(19) United States
(12) Patent Application Publication
(10) Pub. No.: US 2026/0132404 A1
(43) Pub. Date: May 14, 2026

(54) MODIFIED OLIGONUCLEOTIDES AND DOUBLE-STRANDED RNAS

(71) Applicant: ALNYLAM PHARMACEUTICALS, INC., Cambridge, MA (US)

(72) Inventors: Muthiah MANOHARAN, Cambrigde, MA (US); Rajat S. DAS, Cambrigde, MA (US); Kallanthottahill RAJEEV, Cambrigde, MA (US); Dhrubajyoti DATTA, Cambrigde, MA (US); Christopher THEILE, Cambrigde, MA (US)

(73) Assignee: ALNYLAM PHARMACEUTICALS, INC., CAMBRIDGE, MA (US)

(21) Appl. No.: 19/115,562

(22) PCT Filed: Sep. 29, 2023
(86) PCT No.: PCT/US2023/075580

§ 371 Date: Mar. 26, 2025

Related U.S. Application Data
(60) Provisional application No. 63/412,000, filed on Sep. 30, 2022.
(60) Provisional application No. 63/451,486, filed on Mar. 10, 2023.

(51) Int. Cl. C12N 15/113; A61K 9/00; A61K 31/7105; A61K 31/7115; A61K 31/712; A61K 31/7125; A61K 31/713

(52) U.S. Cl. CPC C12N 15/113; A61K 9/0019; A61K 31/7105; A61K 31/7115; A61K 31/712; A61K 31/7125; A61K 31/713; C12N 2310/14; C12N 2310/315; C12N 2310/321; C12N 2310/322; C12N 2310/33

(57) ABSTRACT

The technology described herein relates modified oligonucleotides and double-stranded RNAs, e.g., siRNAs, compositions and kits comprising them and methods of their use for inhibiting target genes.

### CROSS REFERENCE TO RELATED APPLICATIONS

[0001] This application claims benefit under 35 U.S.C. § 119 (e) of U.S. Provisional Application No. 63/412,000 filed Sep. 30, 2022 and U.S. Provisional Application No. 63/451,486 filed Mar. 10, 2023, the contents of each of which are incorporated herein by reference in their entireties.

### SEQUENCE LISTING

[0002] The instant application contains a Sequence Listing which has been submitted electronically in XML format, and is hereby incorporated by reference in its entirety. Said XML copy, created on Sep. 29, 2023 is named “051058-000100WOPT_SL.xml” and is 4,106,746 bytes in size.

### TECHNICAL FIELD

[0003] The technology described herein relates modified oligonucleotides and double-stranded RNAs, e.g., siRNAs, compositions and kits comprising them and methods of their use for inhibiting target genes.

### BACKGROUND

[0004] There remains a need in the art for oligonucleotides and siRNAs having improved activity and/or pharmacodynamics. The present disclosure addresses some of these needs.

### SUMMARY

[0005] In one aspect provided herein is a double-stranded nucleic acid (e.g., dsRNA) comprising an antisense strand and a sense strand, wherein the antisense strand and the sense strand are complementary to each other and form a double-stranded region, e.g., a double-stranded region of at least 15 base-pairs. The antisense strand comprises a ligand at its 3′-end and at least one nuclease resistant modification at each end. In other words, the antisense strand comprises a ligand at its 3′-end, at least one nuclease resistant modification at its 3′-end and at least one nuclease resistant modification at its 5′-end.

[0006] In some embodiments of any one of the aspects described herein, the sense strand also comprises at least one nuclease resistant modification. For example, the sense strand comprises at least one nuclease resistant modification at its 5′-end. In another non-limiting example, the sense strand comprises at least one nuclease resistant modification at its 3-end. In yet another non-limiting example, the sense strand comprises at least one nuclease resistant modification at its 3′-end and at least one nuclease resistant modification at its 5′-end.

[0007] As used herein, a nuclease resistant modification is a modification which makes a nucleic acid (e.g., dsRNA) more stable to degradation with nucleases (e.g., endo- or exo-nucleases). In other words, a nuclease resistant modification is a modification that inhibits or reduces cleavage of a nucleic acid by an endo- or exo-nuclease relative to the cleavage of dsRNA lacking that modification. Generally, a nuclease resistant modification is a modified internucleoside linkage, a modified sugar moiety and/or a modified nucleobase. In some embodiments of any one of the aspects described herein, the nuclease resistant modification is a modified internucleoside linkage, e.g., an internucleoside linkage other than a phosphate ester. For example, the nuclease resistant modification is a phosphorothioate or phosphorodithioate internucleoside linkage.

[0008] In some embodiments, the nuclease resistant modification is a 2′-5′-linked nucleotide, e.g.,

[chemical structure]

where B is an optionally modified nucleobase and R is —OH or a sugar modification described herein (e.g., —F, —OMe).

[0009] In some embodiments, the nuclease resistant modification is a L-nucleotide,

[chemical structure]

where B is an optionally modified nucleobase and R is —OH or a sugar modification described herein (e.g., —F, —OMe).

[0010] In another aspect, provided herein is a compound of Formula (I):

[chemical structure]

[0011] In compounds of Formula (I), B is an optionally modified nucleobase.

[0012] In compounds of Formula (I), X^{S} is O, CH₂, S, or NH. In some embodiments of any one of the aspects described herein, X^{S} is O or CH₂. For example, X^{S} is O.

[0013] In compounds of Formula (I), R⁵ is -L¹-R^{H} or —O—N(R¹³)R¹⁴, where L¹ is a bond, -L³-, C₁₋₃₀alkylene, C₂₋₃₀alkenylene, C₂₋₃₀alkynylene, *-L³-C₁₋₃₀alkylene *-L³-C₂₋₃₀alkenylene, or *-L³-C₂₋₃₀alkynylene; L³ is —O—, —N(R^{L3})—, —S—, —C(O)—, —S(O)—, —S(O)₂—, —P(X^{L3})(Y^{L3}R^{L3B})—; R^{L3} is hydrogen, optionally substituted C₁₋₃₀alkyl, optionally substituted C₁-C₃₀alkoxy, C₁₋₄haloalkyl, optionally substituted C₂₋₄alkenyl, optionally substituted C₂₋₄alkynyl, optionally substituted C₁₋₃₀alkyl-CO₂H, or a nitrogen-protecting group; X^{L2} is O or S; Y^{L3} is O, S, NH, or a bond; R^{L3B} is H or optionally substituted alkyl; * is bond to R^{H}; and R^{H} is 4-8 membered heterocyclyl comprising 1, 2 or 3 heteroatoms selected independently from N, O and S, and the heterocyclyl is optionally substituted with 1, 2, 3 or 4 independently selected substituents, and, optionally, the heterocyclyl comprises at least one nitrogen atom; or R^{H} is

[chemical structure]

where X is O, NR^{L}, S, or CH₂; R^{L} is hydrogen, a ligand, a linker covalently bonded to one or more ligands, aliphatic and aromatic alkyl, alkylester, alkylamine, dimethylamino alkyl, alkylether, alkylthioether, heteroaromatic alkyl, allyl, vinyl, alkyl groups functionalized with disulfide, oxime, ketone, acetal, hemiacetal, cleavable peptides, or cleavable sugars; and R¹³ and R¹⁴ are independently -L²-R^{H2}, where L² is a linker; and R^{H2} is 4-8 membered heterocyclyl comprising 1, 2 or 3 heteroatoms selected independently from N, O and S, and the heterocyclyl is optionally substituted with 1, 2, 3 or 4 independently selected substituents, and, optionally at least one of R¹³ and R¹⁴ is -L²-R^{H2}.

[0014] In some compounds of Formula (I), R⁵ is -L¹-R^{H}.

[0015] In some compounds of Formula (I), L¹ is L³. For example, L¹ is —O—, —N(R^{L3})—, —S—, —C(O)—, —S(O)—, —S(O)₂—, or —P(X^{L3})(Y^{L3}R^{L3B})—.

[0016] In some compounds of Formula (I), L¹ is O or a C₁₋₃₀ alkylene. For example, L¹ is O. In some other non-limiting example, L¹ is —(CH₂)ₙ—, where n is 0 or an integer selected from 1 to 30 (e.g., n is 1, 2, 3, 4, 5, 6, 7, 8, 9, 10, 11, 12, 13, 14, 15, 16, 17, 18, 19, 20, 21, 22, 23, 24, 25, 26, 27, 28, 29 or 30, such as n is 1, 2, 3, 4, 5 or 6). In some embodiments of any one of the aspects described herein, L¹ is methylene, i.e., —CH₂—.

[0017] In some compounds of Formula (I), R^{H} is an optionally substituted 6-membered heterocyclyl comprising a nitrogen atom and 0, 1 or 2 additional heteroatoms selected independently from N, O and S. In some compounds of Formula (I), R^{H} is

[chemical structure]

where X is O, NR^{L}, S, or CH₂; and R^{L} is hydrogen, a ligand, a linker covalently bonded to one or more ligands, aliphatic and aromatic alkyl, alkylester, alkylamine, dimethylamino alkyl, alkylether, alkylthioether, heteroaromatic alkyl, allyl, vinyl, alkyl groups functionalized with disulfide, oxime, ketone, acetal, hemiacetal, cleavable peptides, or cleavable sugars.

[0018] In some compounds of Formula (I), R^{H} is

[chemical structure]

where X is O.

[0019] In some other compounds of Formula (I), R^{H} is

[chemical structure]

where X is NR^{L}. In some further embodiments of these compounds, R^{L} is H or aliphatic and aromatic alkyl, alkylester, alkylamine, dimethylamino alkyl, alkylether, alkylthioether, heteroaromatic alkyl, allyl, vinyl, alkyl groups functionalized with disulfide, oxime, ketone, acetal, hemiacetal, cleavable peptides, or cleavable sugars. In yet some other embodiments of these compounds, R^{L} is a ligand or linker covalently bonded to one or more independently selected ligands.

[0020] In some compounds of Formula (I), R^{H} is

[chemical structure]

where X is O.

[0021] In some other compounds of Formula (I), R^{H} is

[chemical structure]

where X is NR^{L}. In some further embodiments of these compounds, R^{L} is H or aliphatic and aromatic alkyl, alkylester, alkylamine, dimethylamino alkyl, alkylether, alkylthioether, heteroaromatic alkyl, allyl, vinyl, alkyl groups functionalized with disulfide, oxime, ketone, acetal, hemiacetal, cleavable peptides, or cleavable sugars. In yet some other embodiments of these compounds, R^{L} is a ligand or linker covalently bonded to one or more independently selected ligands.

[0022] In some compounds of Formula (I), R⁵ is —O—N(R¹³)R¹⁴. It is noted, when R⁵ is —O—N(R¹³)R¹⁴, R¹³ and R¹⁴ can be same or different. Accordingly, in some compounds of Formula (I), R¹³ and R¹⁴ are same. In some other compounds of Formula (I), R¹³ and R¹⁴ are different.

[0023] In some compounds of Formula (I) described herein, one or both of R¹³ and R¹⁴ can be -L²-R^{H2}.

[0024] In some compounds of Formula (I), L² is a bond or an optionally substituted alkylene. For example, L² is a bond. In some other compounds of Formula (I), L² is —Z—(CH₂)ₘ—, where Z is absent, aryl, heteroaryl, cycloalkyl or heterocyclyl; and m is 0 or an integer selected from 1 to 20 (e.g., m is 1, 2, 3, 4, 5, 6, 7, 8, 9, 10, 11, 12, 13, 14 or 15, such as m is 1, 2, 3, 4, 5 or 6). For example, L² is —(CH₂)ₘ— or —(CH₂)ₘ-phenyl-.

[0025] In some compounds of Formula (I), at least one (e.g., one or both) of R¹³ and R¹⁴ is —

[chemical structure]

[0026] In some compounds of Formula (I), R^{H2} is an optionally substituted 6-membered heterocyclyl comprising a nitrogen atom and 0, 1 or 2 additional heteroatoms selected independently from N, O and S. For example, R^{H2} is

[chemical structure]

where X is O, NR^{L}, S, or CH₂; and R^{L} is hydrogen, a ligand, a linker covalently bonded to one or more ligands, aliphatic and aromatic alkyl, alkylester, alkylamine, dimethylamino alkyl, alkylether, alkylthioether, heteroaromatic alkyl, allyl, vinyl, alkyl groups functionalized with disulfide, oxime, ketone, acetal, hemiacetal, cleavable peptides, or cleavable sugars.

[0027] In some compounds of Formula (I), R^{H2} is

[chemical structure]

where X is O.

[0028] In some other compounds of Formula (I), R^{H2} is

[chemical structure]

where X is NR^{L}. In some further embodiments, R^{L} is H or aliphatic and aromatic alkyl, alkylester, alkylamine, dimethylamino alkyl, alkylether, alkylthioether, heteroaromatic alkyl, allyl, vinyl, alkyl groups functionalized with disulfide, oxime, ketone, acetal, hemiacetal, cleavable peptides, or cleavable sugars. In yet some other embodiments of any one of the aspects described herein, R^{L} is a ligand or linker covalently bonded to one or more independently selected ligands.

[0029] In some compounds of Formula (I), one of R¹³ and R¹⁴ is an optionally substituted C₁-C₆alkyl. For example, one of R¹³ and R¹⁴ is methyl.

[0030] In some embodiments of compounds of Formula (I), one of R¹³ and R¹⁴ is -L²-R^{H2} and the other is an optionally substituted C₁-C₆alkyl (e.g., methyl).

[0031] In some compounds of Formula (I), one of R¹³ and R¹⁴ is

[chemical structure]

and the other of R¹³ and R¹⁴ is C₁-C₆alkyl,

[chemical structure]

[0032] In some embodiments of any one of the aspects described herein, X^{P} is —P(X)(OR^{V})₂, where each X is independently O or S, and each R^{V} is H or oxygen protecting group. For example, R⁵ is —CH—CH—P(X)(OR^{V})₂, where each X is independently O or S, and each RY is independently H or an oxygen protecting group.

[0033] In some cases, X is O. For example, R⁵ is —CH═CH—P(O)(OR^{V})₂. In some embodiments, R⁵ is —CH═CH—P(O)(OH)₂. In some other embodiments, R⁵ is —CH═CH—P(O)(OR^{V})₂, where each R^{V} is independently an oxygen protecting group. For example, R⁵ is —CH═CH—P(O)(OR^{V})₂, where each R^{V} is independently 4-pentenyloxymethyl (POM). In yet some other embodiments, R⁵ is —CH═CH—P(O)(OH)(OR^{V}), where R^{V} is an oxygen protecting group.

[0034] In some cases, X is S. For example, R⁵ is —CH═CH—P(S)(OR^{V})₂. In some embodiments, R⁵ is —CH═CH—P(S)(OH)₂. In some other embodiments, R⁵ is —CH═CH—P(S)(OR^{V})₂, where each R^{V} is independently an oxygen protecting group. For example, R⁵ is —CH═CH—P(S)(OR^{V})₂, where each R^{V} is independently 4-pentenyloxymethyl (POM). In yet some other embodiments, R⁵ is —CH═CH—P(S)(OH)(OR^{V}), where R^{V} is an oxygen protecting group.

[0035] In compounds of Formula (I), R² is hydrogen, hydroxyl, protected hydroxyl, phosphate group, reactive phosphorous group, halogen, optionally substituted C₁₋₃₀ alkyl, optionally substituted C₂₋₃₀alkenyl, optionally substituted C₂₋₃₀alkynyl, optionally substituted C₁₋₃₀ alkoxy (e.g., methoxy or 2′-methoxyethoxy), alkoxyalkyl (e.g., 2-methoxyethyl), alkoxyalkylamine, alkoxyoxycarboxylate, amino, alkylamino, dialkylamino, 5-8 membered heterocyclyl, —O—C₄₋₃₀alkyl-ON(CH₂R⁸)(CH₂R⁹), or —O—C₄₋₃₀alkyl-ON(CH₂R⁸)(CH₂R⁹), a ligand, a linker covalently bonded to one or more ligands, a solid support, a linker or a linker covalently bonded a solid support. In some compounds of Formula (I), R² can be hydrogen, hydroxyl, protected hydroxyl, phosphate group, reactive phosphorous group, halogen, optionally substituted C₁₋₃₀ alkyl, optionally substituted C₂₋₃₀alkenyl, optionally substituted C₂₋₃₀alkynyl, optionally substituted C₁₋₃₀ alkoxy (e.g., methoxy or 2′-methoxyethoxy), alkoxyalkyl (e.g., 2-methoxyethyl), amino, alkylamino, dialkylamino, —O—C₄₋₃₀alkyl-ON(CH₂R⁸)(CH₂R⁹), or —O—C₄₋₃₀alkyl-ON(CH₂R⁸)(CH₂R⁹), alkoxyoxycarboxylate. In some compounds of Formula (I), R² can be hydrogen, hydroxyl, halogen, protected hydroxyl, phosphate group, reactive phosphorous group, optionally substituted C₁₋₃₀ alkyl, optionally substituted C₂₋₃₀ alkenyl, optionally substituted C₂₋₃₀ alkynyl, optionally substituted C₁₋₃₀alkoxy (e.g., methoxy or 2′-methoxyethoxy), alkoxyalkyl (e.g., methoxyethyl), amino, alkylamino, dialkylamino, —O—C₄₋₃₀alkyl-ON(CH₂R⁸)(CH₂R⁹), —O—C₄₋₃₀alkyl-ON(CH₂R⁸)(CH₂R⁹). In some compounds of Formula (I), R² is hydrogen, hydroxyl, protected hydroxyl, fluoro, methoxy, ethoxy, 2-methoxyethoxy, C₆₋₂₄ alkyl (e.g., n-C₆₋₂₄ alkyl), or a reactive phosphorous group. In some compounds of Formula (I), R² is hydrogen, hydroxyl, protected hydroxyl, fluoro, methoxy, ethoxy, 2-methoxyethoxy, or a reactive phosphorous group. In some compounds of Formula (I), R² is hydrogen, hydroxyl, protected hydroxyl, fluoro or methoxy. In some compounds of Formula (I), R² is hydrogen, fluoro or methoxy.

[0036] In compounds of Formula (I), R³ is hydrogen, hydroxyl, protected hydroxyl, phosphate group, reactive phosphorous group, halogen, optionally substituted C₁₋₃₀ alkyl, optionally substituted C₂₋₃₀alkenyl, optionally substituted C₂₋₃₀alkynyl, optionally substituted C₁₋₃₀ alkoxy (e.g., methoxy or 2′-methoxyethoxy), alkoxyalkyl (e.g., 2-methoxyethyl), alkoxyalkylamine, alkoxyoxycarboxylate, amino, alkylamino, dialkylamino, 5-8 membered heterocyclyl, —O—C₄₋₃₀alkyl-ON(CH₂R⁸)(CH₂R⁹), or —O—C₄₋₃₀alkyl-ON(CH₂R⁸)(CH₂R⁹), a ligand, a linker covalently bonded to one or more ligands, a solid support, a linker or a linker covalently bonded a solid support. In some compounds of Formula (I), R³ can be hydrogen, hydroxyl, protected hydroxyl, phosphate group, reactive phosphorous group, halogen, optionally substituted C₁₋₃₀ alkyl, optionally substituted C₂₋₃₀alkenyl, optionally substituted C₂₋₃₀alkynyl, optionally substituted C₁₋₃₀ alkoxy (e.g., methoxy or 2′-methoxyethoxy), alkoxyalkyl (e.g., 2-methoxyethyl), amino, alkylamino, dialkylamino, —O—C₄₋₃₀alkyl-ON(CH₂R⁸)(CH₂R⁹), or —O—C₄₋₃₀alkyl-ON(CH₂R⁸)(CH₂R⁹), alkoxyoxycarboxylate. For example, R³ can be reactive phosphorous group, hydrogen, hydroxyl, halogen, protected hydroxyl, phosphate group, optionally substituted C₁₋₃₀ alkyl, optionally substituted C₂₋₃₀ alkenyl, optionally substituted C₂₋₃₀ alkynyl, optionally substituted C₁₋₃₀alkoxy (e.g., methoxy or 2′-methoxyethoxy), alkoxyalkyl (e.g., methoxyethyl), amino, alkylamino, dialkylamino, —O—C₄₋₃₀alkyl-ON(CH₂R⁸)(CH₂R⁹), —O—C₄₋₃₀alkyl-ON(CH₂R⁸)(CH₂R⁹). In some compounds of Formula (I), R³ is a reactive phosphorous group, hydrogen, hydroxyl, protected hydroxyl, fluoro, methoxy, ethoxy, 2-methoxyethoxy, or C₆₋₂₄ alkyl (e.g., n-C₆₋₂₄ alkyl). In some compounds of Formula (I), R³ is a reactive phosphorous group, hydrogen, hydroxyl, protected hydroxyl, fluoro, methoxy, ethoxy, or 2-methoxyethoxy. In some compounds of Formula (I), R³ is a reactive phosphorous group. In some compounds of Formula (I), R³ is a phosphoramidite group such as 3′-[(2-cyanoethyl)-(N,N-diisopropyl)]-phosphoramidite, 3′-[(2-cyanoethyl)-(N,N-diisopropyl)]-phosphoramidite, or 3′-[(ß-thiobenzoylethyl)-(1-pyrrolidinyl)]-thiophosphoramidite).

[0037] It is noted that in compounds of Formula (I) no more than one of R² and R³ is a reactive phosphorous group. For example, only R³ is a reactive phosphorous group.

[0038] In some compounds of Formula (I), R⁴ is hydrogen, optionally substituted C₁₋₆alkyl, optionally substituted C₂₋₆alkenyl, optionally substituted C₂₋₆alkynyl, or optionally substituted C₁₋₆alkoxy. For example, R⁴ in Formula (I) is H.

[0039] In some compounds of Formula (I), R⁴ and R² taken together are 4′-C(R¹⁰R¹¹)ᵥ—Y-2′ or 4′-Y—C(R¹⁰R¹¹)ᵥ-2′;Y is —O—, —CH₂—, —CH(Me)—, —C(CH₃)₂—, —S—, —N(R¹²)—, —C(O)—, —C(S)—, —S(O)—, —S(O)₂—, —OC(O)—, —C(O)O—, —N(R¹²)C(O)—, or —C(O)N(R¹²)—; R¹⁰ and R¹¹ independently are H, optionally substituted C₁-C₆alkyl, optionally substituted C₂-C₆alkenyl or optionally substituted C₂-C₆alkynyl; R¹² is hydrogen, optionally substituted C₁₋₃₀alkyl, optionally substituted C₁-C₃₀alkoxy, C₁₋₄haloalkyl, optionally substituted C₂₋₄alkenyl, optionally substituted C₂₋₄alkynyl, optionally substituted C₁₋₃₀alkyl-CO₂H, or a nitrogen-protecting group; and v is 1, 2 or 3. For example, R² and R⁴ taken together are 4′-C(R¹⁰R¹¹)ᵥ—Y-2′ or 4′-Y—C(R¹⁰R¹¹)ᵥ-2′.

[0040] In some compounds of Formula (I), R⁴ and R³ taken together with the atoms to which they are attached form an optionally substituted C₃₋₈cycloalkyl, optionally substituted C₃₋₈cycloalkenyl, or optionally substituted 3-8 membered heterocyclyl.

[0041] In some embodiments of any one of the aspects described herein, the compound of Formula (I) is a compound selected from formulae (I-A)-(I-D):

[chemical structure]

[0042] In some compounds of Formula (I), (I-A), (I-B), (I-C) or (I-D), X^{S} is O; R² and R⁴ taken together are 4′-Y—C(R¹⁰R¹¹)ᵥ-2′; and R³ is a reactive phosphorous group, hydroxyl or protected hydroxyl.

[0043] In some compounds of Formula (I), (I-A), (I-B), (I-C) or (I-D), X^{S} is O; R² is H, —OMe, —F; R³ is a reactive phosphorous group, hydroxyl or protected hydroxyl; and R⁴ is H.

[0044] In some embodiments of the various aspects described herein, the compound of Formula (I) is of Formula (I-E):

[chemical structure]

[0045] In some compounds of Formula (I-E), R³ is a reactive phosphorous group, hydroxyl, or protected hydroxyl; R⁵ is -L¹-R^{H}; and X^{S}, B, Y, R¹⁰ and R¹¹ are as defined for Formula (I).

[0046] In some embodiments of the various aspects described herein, the compound of Formula (I-E) is of Formula (I-E¹) or (I-E²):

[chemical structure]

where n is 0 or an integer selected from 1 to 30 (e.g., n is 1, 2, 3, 4, 5, 6, 7, 8, 9, 10, 11, 12, 13, 14, 15, 16, 16, 17, 18, 19, 20, 21, 22, 23, 24, 25, 26, 27, 28, 29 or 30, such as n is 1, 2, 3, 4, 5 or 6, preferably n is 0 or 1); and
[0047] R^{L} is H, a ligand, a linker covalently bonded to one or more ligands, aliphatic and aromatic alkyl, alkylester, alkylamine, dimethylamino alkyl, alkylether, alkylthioether, heteroaromatic alkyl, allyl, vinyl, alkyl groups functionalized with disulfide, oxime, ketone, acetal, hemiacetal, cleavable peptides, or cleavable sugars.

[0048] In some compounds of Formula (I-E¹) or (I-E²), X^{s} is O; Y is O; and one of R¹⁰ and R¹¹ is H and the other is H, a ligand, a linker covalently bonded to one or more ligands, aliphatic and aromatic alkyl, alkylester, alkylamine, dimethylamino alkyl, alkylether, alkylthioether, heteroaromatic alkyl, allyl, vinyl, alkyl groups functionalized with disulfide, oxime, ketone, acetal, hemiacetal, cleavable peptides, or cleavable sugars. For example, one of R¹⁰ and R¹¹ is H and the other is H or linear, cyclic or branched alkyl (e.g., methyl, propyl, isopropyl, etc.)

[0049] In some embodiments of the various aspects described herein, the compound of Formula (I-E) is of Formula (I-Ea), (I-Eb) or (I-Ec):

[chemical structure]

[0050] In some compounds of Formula (I-E), R³ is a reactive phosphorous group, hydroxyl, or protected hydroxyl; and X^{S}, B, Y, R¹⁰ and R¹¹ are as defined for Formula (I).

[0051] In some embodiments of the various aspects described herein, the compound of Formula (I-E) is of Formula (I-E³) or (I-E⁴):

[chemical structure]

where n is 0 or an integer selected from 1 to 30 (e.g., n is 1, 2, 3, 4, 5, 6, 7, 8, 9, 10, 11, 12, 13, 14, 15, 16, 16, 17, 18, 19, 20, 21, 22, 23, 24, 25, 26, 27, 28, 29 or 30, such as n is 1, 2, 3, 4, 5 or 6, preferably n is 0 or 1); and
[0052] R^{L} is H, a ligand, a linker covalently bonded to one or more ligands, aliphatic and aromatic alkyl, alkylester, alkylamine, dimethylamino alkyl, alkylether, alkylthioether, heteroaromatic alkyl, allyl, vinyl, alkyl groups functionalized with disulfide, oxime, ketone, acetal, hemiacetal, cleavable peptides, or cleavable sugars.

[0053] In some embodiments of the various aspects described herein, the compound of Formula (I-Ea) is of Formula (I-Ed) or (I-Ee):

[chemical structure]

[0054] In some embodiments of the various aspects described herein, the compound of Formula (I-Eb) is of Formula (I-Ef):

[chemical structure]

[0055] In some embodiments of the various aspects described herein, the compound of Formula (I-Ec) is of Formula (I-Eg):

[chemical structure]

[0056] In some compounds of Formula (I-Ed), (I-E³), (I-E⁴), (I-Ee), (I-Ef) and/or (I-Eg), R³ is a reactive phosphorous group, hydroxyl or protected hydroxyl. For example, in some compounds of Formula (I-Ed), (I-E³), (I-E⁴), (I-Ee), (I-Ef) and/or (I-Eg), R³ is —OP(OR^{P})(N(R^{P2})₂), where R^{P} is cyanoethyl (—CH₂CH₂CN) and each R^{P2} is isopropyl.

[0057] In some embodiments of the various aspects described herein, R⁵ is not morpholin-4-yl unless R⁴ and R² taken together are 4′-C(R¹⁰R¹¹)ᵥ—Y-2′ or 4′-Y—C(R¹⁰R¹¹)ᵥ-2′.

[0058] In some embodiments of the various aspects described herein, when R² is H, hydroxyl, protected hydroxyl, alkoxy, or halogen; R³ is hydroxyl, protected hydroxyl, or reactive phosphorous group; R⁴ is H; and X^{S} is O, then R⁵ is not morpholin-4-yl.

### Oligonucleotides

[0059] The compounds of Formula (I) are useful in the synthesis oligonucleotides. Accordingly, in another aspect, provided herein is an oligonucleotide prepared using a compound of Formula (I). For example, an oligonucleotide comprising a nucleoside of Formula (II). Accordingly, in another aspect, provided herein is an oligonucleotide comprising at least one nucleoside of Formula (II):

[chemical structure]

[0060] In nucleosides of Formula (II), B is an optionally modified nucleobase.

[0061] In nucleosides of Formula (II), X^{S} is O, CH₂, S, or NH. In some embodiments of any one of the aspects described herein, X^{S} is O or CH₂. For example, X^{S} is O.

[0062] In nucleosides of Formula (II), R⁵ is -L¹-R^{H} or —O—N(R¹³)R¹⁴, where L¹ is a bond, -L³-, C₁₋₃₀alkylene, C₂₋₃₀alkenylene, C₂₋₃₀alkynylene, *-L³-C₁₋₃₀alkylene *-L³-C₂₋₃₀alkenylene, or *-L³-C₂₋₃₀alkynylene; L³ is —O—, —N(R^{L3})—, —S—, —C(O)—, —S(O)—, —S(O)₂—, —P(X^{L3})(Y^{L3}R^{L3B})—; R^{L3} is hydrogen, optionally substituted C₁₋₃₀alkyl, optionally substituted C₁-C₃₀alkoxy, C₁₋₄haloalkyl, optionally substituted C₂₋₄alkenyl, optionally substituted C₂₋₄alkynyl, optionally substituted C₁₋₃₀alkyl-CO₂H, or a nitrogen-protecting group; X^{L2} is O or S; Y^{L3} is O, S, NH, or a bond; R^{L3B} is H or optionally substituted alkyl; * is bond to R^{H}; and R^{H} is 4-8 membered heterocyclyl comprising 1, 2 or 3 heteroatoms selected independently from N, O and S, and the heterocyclyl is optionally substituted with 1, 2, 3 or 4 independently selected substituents, and, optionally, the heterocyclyl comprises at least one nitrogen atom, or R^{H} is

[chemical structure]

where X is O, NR^{L}, S, or CH₂; R^{L} is hydrogen, a ligand, a linker covalently bonded to one or more ligands, aliphatic and aromatic alkyl, alkylester, alkylamine, dimethylamino alkyl, alkylether, alkylthioether, heteroaromatic alkyl, allyl, vinyl, alkyl groups functionalized with disulfide, oxime, ketone, acetal, hemiacetal, cleavable peptides, or cleavable sugars; and R¹³ and R¹⁴ are independently-L²-R^{H2}, where L² is a linker; and R^{H2} is 4-8 membered heterocyclyl comprising 1, 2 or 3 heteroatoms selected independently from N, O and S, and the heterocyclyl is optionally substituted with 1, 2, 3 or 4 independently selected substituents, and, optionally at least one of R¹³ and R¹⁴ is -L²-R^{H2}.

[0063] In some nucleosides of Formula (II), R⁵ is -L¹-R^{H}.

[0064] In some nucleosides of Formula (II), L¹ is L³. For example, L¹ is —O—, —N(R^{L3})—, —S—, —C(O)—, —S(O)—, —S(O)₂—, or —P(X^{L3})(Y^{L3}R^{L3B})—.

[0065] In some nucleosides of Formula (II), L¹ is O or an optionally substituted alkylene. For example, L¹ is O. In some other non-limiting example, L¹ is —(CH₂)ₙ—, where n is 0 or an integer selected from 1 to 20 (e.g., n is 1, 2, 3, 4, 5, 6, 7, 8, 9, 10, 11, 12, 13, 14 or 15, such as n is 1, 2, 3, 4, 5 or 6). In some embodiments of any one of the aspects described herein, L¹ is methylene, i.e., —CH₂—.

[0066] In some nucleosides of Formula (II), R^{H} is an optionally substituted 6-membered heterocyclyl comprising a nitrogen atom and 0, 1 or 2 additional heteroatoms selected independently from N, O and S. For example, R^{H} is

[chemical structure]

where X is O, NR^{L}, S, or CH₂; and R^{L} is hydrogen, a ligand, a linker covalently bonded to one or more ligands, aliphatic and aromatic alkyl, alkylester, alkylamine, dimethylamino alkyl, alkylether, alkylthioether, heteroaromatic alkyl, allyl, vinyl, alkyl groups functionalized with disulfide, oxime, ketone, acetal, hemiacetal, cleavable peptides, or cleavable sugars.

[0067] In some nucleosides of Formula (II), R^{H} is

[chemical structure]

where X is O.

[0068] In some other nucleosides of Formula (II), R^{H} is

[chemical structure]

where X is NR^{L}. In some further embodiments of these compounds, R^{L} is H or aliphatic and aromatic alkyl, alkylester, alkylamine, dimethylamino alkyl, alkylether, alkylthioether, heteroaromatic alkyl, allyl, vinyl, alkyl groups functionalized with disulfide, oxime, ketone, acetal, hemiacetal, cleavable peptides, or cleavable sugars. In yet some other embodiments of these compounds, R^{L} is a ligand or linker covalently bonded to one or more independently selected ligands.

[0069] In some nucleosides of Formula (II), R^{H} is

[chemical structure]

where X is O.

[0070] In some other nucleosides of Formula (II), R^{H} is

[chemical structure]

where X is NR^{L}. In some further embodiments of these compounds, R^{L} is H or aliphatic and aromatic alkyl, alkylester, alkylamine, dimethylamino alkyl, alkylether, alkylthioether, heteroaromatic alkyl, allyl, vinyl, alkyl groups functionalized with disulfide, oxime, ketone, acetal, hemiacetal, cleavable peptides, or cleavable sugars. In yet some other embodiments of these compounds, R^{L} is a ligand or linker covalently bonded to one or more independently selected ligands.

[0071] In some nucleosides of Formula (II), R⁵ is —O—N(R¹³)R¹⁴. It is noted, when R⁵ is —O—N(R¹³)R¹⁴, R¹³ and R¹⁴ can be same or different. Accordingly, in some nucleosides of Formula (II), R¹³ and R¹⁴ are same. In some other compounds of Formula (I), R¹³ and R¹⁴ are different.

[0072] In some nucleosides of Formula (II) described herein, one or both of R¹³ and R¹⁴ can be -L²-R^{H2}.

[0073] In some nucleosides of Formula (II), L² is a bond or an optionally substituted alkylene. For example, L² is a bond. In some other compounds of Formula (I), L² is —Z—(CH₂)ₘ—, where Z is absent, aryl, heteroaryl, cycloalkyl or heterocyclyl; and m is 0 or an integer selected from 1 to 20 (e.g., m is 1, 2, 3, 4, 5, 6, 7, 8, 9, 10, 11, 12, 13, 14 or 15, such as m is 1, 2, 3, 4, 5 or 6). For example, L² is —(CH₂)ₘ— or —(CH₂)ₘ-phenyl-.

[0074] In some nucleosides of Formula (II), at least one (e.g., one or both) of R¹³ and R¹⁴ is

[chemical structure]

[0075] In some compounds of Formula (I), R^{H2} is an optionally substituted 6-membered heterocyclyl comprising a nitrogen atom and 0, 1 or 2 additional heteroatoms selected independently from N, O and S. For example, R^{H2} is

[chemical structure]

where X is O, NR^{L}, S, or CH₂; and R^{L} is hydrogen, a ligand, a linker covalently bonded to one or more ligands, aliphatic and aromatic alkyl, alkylester, alkylamine, dimethylamino alkyl, alkylether, alkylthioether, heteroaromatic alkyl, allyl, vinyl, alkyl groups functionalized with disulfide, oxime, ketone, acetal, hemiacetal, cleavable peptides, or cleavable sugars.

[0076] In some nucleosides of Formula (II), R^{H2} is

[chemical structure]

where X is O.

[0077] In some other nucleosides of Formula (II), R^{H2} is

[chemical structure]

where X is NR^{L}. In some further embodiments, R^{L} is H or aliphatic and aromatic alkyl, alkylester, alkylamine, dimethylamino alkyl, alkylether, alkylthioether, heteroaromatic alkyl, allyl, vinyl, alkyl groups functionalized with disulfide, oxime, ketone, acetal, hemiacetal, cleavable peptides, or cleavable sugars. In yet some other embodiments of any one of the aspects described herein, R^{L} is a ligand or linker covalently bonded to one or more independently selected ligands.

[0078] In some nucleosides of Formula (II), one of R¹³ and R¹⁴ is an optionally substituted C₁-C₆alkyl. For example, one of R¹³ and R¹⁴ is methyl.

[0079] In some embodiments of nucleosides of Formula (II), one of R¹³ and R¹⁴ is -L²-R^{H2} and the other is an optionally substituted C₁-C₆alkyl (e.g., methyl).

[0080] In some nucleosides of Formula (II), one of R¹³ and R¹⁴ is

[chemical structure]

and the other of R¹³ and R¹⁴ is C₁-C₆alkyl,

[chemical structure]

[0081] In some nucleosides of Formula (II), X^{P} is —P(X)(OR^{V})₂, where each X is independently O or S, and each R^{V} is H or oxygen protecting group. For example, in some nucleosides of Formula (II), R⁵ is —CH═CH—P(X)(OR^{V})₂, where each X is independently O or S, and each R^{V} is independently H or an oxygen protecting group.

[0082] In some nucleosides of Formula (II), X is O. For example, in some nucleosides of Formula (II), R⁵ is —CH═CH—P(O)(OR^{V})₂. In some nucleosides of Formula (II), R⁵ is —CH═CH—P(O)(OH)₂. In some other in nucleosides of Formula (II), R⁵ is —CH═CH—P(O)(OR^{V})₂, where each R^{V} is independently an oxygen protecting group. For example, in some nucleosides of Formula (II), R⁵ is —CH═CH—P(O)(OR^{V})₂, where each R^{V} is independently 4-pentenyloxymethyl (POM). In yet some nucleosides of Formula (II), R⁵ is —CH═CH—P(O)(OH)(OR^{V}), where R^{V} is an oxygen protecting group.

[0083] In some nucleosides of Formula (II), X is S. For example, in some nucleosides of Formula (II), R⁵ is —CH═CH—P(S)(OR^{V})₂. In some nucleosides of Formula (II), R⁵ is —CH═CH—P(S)(OH)₂. In some other embodiments, R⁵ is —CH═CH—P(S)(OR^{V})₂, where each R^{V} is independently an oxygen protecting group. For example, in some nucleosides of Formula (II), R⁵ is —CH═CH—P(S)(OR^{V})₂, where each RY is independently 4-pentenyloxymethyl (POM). In yet some other nucleosides of Formula (II), R⁵ is —CH═CH—P(S)(OH)(OR^{V}), where R^{V} is an oxygen protecting group.

[0084] In nucleosides of Formula (II), R²² can be a hydroxyl, protected hydroxyl, halogen, optionally substituted C₁₋₃₀ alkoxy (e.g., methoxy, 2-methoxyethoxy), alkoxyalkyl (e.g., 2-methoxyethyl), hydrogen, optionally substituted C₁₋₃₀ alkyl, optionally substituted C₂₋₃₀alkenyl, optionally substituted C₂₋₃₀alkynyl, alkoxyalkylamine, alkoxyoxycarboxylate, amino, alkylamino, dialkylamino, 5-8 membered heterocyclyl, —O—C₄₋₃₀alkyl-ON(CH₂R⁸)(CH₂R⁹), —O—C₄₋₃₀alkyl-ON(CH₂R⁸)(CH₂R⁹), a ligand, a linker covalently bonded to one or more ligands or a bond to an internucleotide linkage to a subsequent nucleoside, provided that at least one, and only one, of R²² and R²³ is a bond to an internucleotide linkage to a subsequent nucleotide. In some embodiments, R²² is a hydroxyl, protected hydroxyl, halogen, optionally substituted C₁₋₃₀ alkoxy (e.g., methoxy, 2-methoxyethoxy), alkoxyalkyl (e.g., 2-methoxyethyl), hydrogen, alkoxyalkylamine, alkoxyoxycarboxylate, amino, alkylamino, or dialkylamino. For example, R²² is a hydroxyl, protected hydroxyl, halogen, or optionally substituted C₁₋₃₀ alkoxy (e.g., methoxy, 2-methoxyethoxy). In some embodiments, R²² is hydrogen, fluoro or methoxy.

[0085] In nucleosides of Formula (II), R²³ can be a bond to an internucleotide linkage to a subsequent nucleoside, hydroxyl, protected hydroxyl, halogen, optionally substituted C₂₋₃₀alkynyl, optionally substituted C₁₋₃₀ alkoxy (e.g., methoxy, 2-methoxyethoxy), alkoxyalkyl (e.g., 2-methoxyethyl), hydrogen, optionally substituted C₁₋₃₀ alkyl, optionally substituted C₂₋₃₀alkenyl, alkoxyalkylamine, alkoxyoxycarboxylate, amino, alkylamino, dialkylamino, 5-8 membered heterocyclyl, —O—C₄₋₃₀alkyl-ON(CH₂R⁸)(CH₂R⁹), —O—C₄₋₃₀alkyl-ON(CH₂R⁸)(CH₂R⁹), phosphate group, a ligand, or a linker covalently bonded to one or more ligands, provided that at least one, and only one, of R²² and R²³ is a bond to an internucleotide linkage to a subsequent nucleotide. In some embodiments, R²³ is a bond to an internucleotide linkage to a subsequent nucleotide.

[0086] In nucleosides of Formula (II), R²⁴ can be hydrogen, optionally substituted C₁₋₆alkyl, optionally substituted C₂₋₆alkenyl, optionally substituted C₂₋₆alkynyl, or optionally substituted C₁-6alkoxy. For example, R²⁴ in nucleosides of Formula (II) is H.

[0087] In some nucleosides of Formula (II), R²⁴ and R₂₂ taken together are 4′-C(R¹⁰R¹¹)ᵥ—Y-2′ or 4′-Y—C(R¹⁰R¹¹)ᵥ-2′;Y is —O—, —CH₂—, —CH(Me)—, —C(CH₃)₂—, —S—, —N(R¹²)—, —C(O)—, —C(S)—, —S(O)—, —S(O)₂—, —OC(O)—, —C(O)O—, —N(R¹²)C(O)—, or —C(O)N(R¹²)—; R¹⁰ and R¹¹ independently are H, optionally substituted C₁-C₆alkyl, optionally substituted C₂-C₆alkenyl or optionally substituted C₂-C₆alkynyl; R¹² is hydrogen, optionally substituted C₁₋₃₀alkyl, optionally substituted C₁-C₃₀alkoxy, C₁₋₄haloalkyl, optionally substituted C₂₋₄alkenyl, optionally substituted C₂₋₄alkynyl, optionally substituted C₁₋₃₀alkyl-CO₂H, or a nitrogen-protecting group; and v is 1, 2 or 3. For example, R²² and R²⁴ taken together are 4′-C(R¹⁰R¹¹)ᵥ—Y-2′ or 4′-Y—C(R¹⁰R¹¹)ᵥ-2.

[0088] In some embodiments of any one of the aspects described herein, the nucleoside of Formula (II) is a nucleoside selected from formulae (II-A)-(II-D):

[chemical structure]

[0089] In some nucleosides of Formula (II), (II-A), (II-B), (II-C) or (II-D), X^{S} is O; R²² and R²⁴ taken together are 4′-Y—C(R¹⁰R¹¹)ᵥ-2′; and R²³ is a bond to an internucleotide linkage to a subsequent nucleoside.

[0090] In some nucleosides of Formula (II), (II-A), (II-B), (II-C) or (II-D), X^{S} is O; R²² is H, —OMe or —F; R²³ is a bond to an internucleotide linkage to a subsequent nucleoside; and R²⁴ is H.

[0091] It is noted that in nucleosides of Formula (II), (II-A), (II-B), (II-C) or (II-D) no more than one of R²² and R²³ is a bond to an internucleotide linkage to a subsequent nucleotide. For example, only R²³ is a bond to an internucleotide linkage to a subsequent nucleotide. In some other non-limiting examples, only R²² is a bond to an internucleotide linkage to a subsequent nucleotide. Preferably, only R²³ is a bond to an internucleotide linkage to a subsequent nucleotide.

[0092] In some embodiments of any one of the aspects described herein, the nucleoside of Formula (II) is of Formula (II-E)

[chemical structure]

[0093] In some nucleosides of Formula (II-E), R²³ is a bond to an internucleotide linkage to a subsequent nucleoside; R⁵ is -L¹-R^{H}; and X^{S}, B, Y, R¹⁰ and R¹¹ are as defined for Formula (II).

[0094] In some embodiments of any one of the aspects described herein, the nucleoside of Formula (II-E) is of Formula (II-E¹) or (II-E²):

[chemical structure]

[0095] wherein
[0096] n is 0 or an integer selected from 1 to 30 (e.g., n is 1, 2, 3, 4, 5, 6, 7, 8, 9, 10, 11, 12, 13, 14, 15, 16, 16, 17, 18, 19, 20, 21, 22, 23, 24, 25, 26, 27, 28, 29 or 30, such as n is 1, 2, 3, 4, 5 or 6, preferably n is 0 or 1); and
[0097] R^{L} is H, a ligand, a linker covalently bonded to one or more ligands, aliphatic and aromatic alkyl, alkylester, alkylamine, dimethylamino alkyl, alkylether, alkylthioether, heteroaromatic alkyl, allyl, vinyl, alkyl groups functionalized with disulfide, oxime, ketone, acetal, hemiacetal, cleavable peptides, or cleavable sugars,
[0098] In some embodiments of any one of the aspects described herein, in nucleoside of Formula (II-E¹) or (II-E²), X^{s} is O; Y is O; and one of R¹⁰ and R¹¹ is H and the other is H, a ligand, a linker covalently bonded to one or more ligands, aliphatic and aromatic alkyl, alkylester, alkylamine, dimethylamino alkyl, alkylether, alkylthioether, heteroaromatic alkyl, allyl, vinyl, alkyl groups functionalized with disulfide, oxime, ketone, acetal, hemiacetal, cleavable peptides, or cleavable sugars. For example, one of R¹⁰ and R¹¹ is H and the other is H or linear, cyclic or branched alkyl (e.g., methyl, propyl, isopropyl, etc.)

[0099] In some embodiments of any one of the aspects described herein, the nucleoside of Formula (II-E) is of Formula (II-Ea), (II-Eb) or (II-Ec):

[chemical structure]

[0100] In some nucleosides of Formula (II-Ea), (II-E¹), (II-E²), (II-Eb) and/or (II-Ec), R²³ is a bond to an internucleotide linkage to a subsequent nucleoside; and X^{S}, B, Y, R¹⁰ and R¹¹ are as defined for Formula (II).

[0101] In some embodiments of any one of the aspects described herein, the nucleoside of Formula (II-Ea) is of Formula (II-Ed) or (II-Ee):

[chemical structure]

[0102] In some embodiments of any one of the aspects described herein, the nucleoside of Formula (II-E) is of Formula (II-E³) or (II-E⁴):

[chemical structure]

[0103] where n is 0 or an integer selected from 1 to 30 (e.g., n is 1, 2, 3, 4, 5, 6, 7, 8, 9, 10, 11, 12, 13, 14, 15, 16, 16, 17, 18, 19, 20, 21, 22, 23, 24, 25, 26, 27, 28, 29 or 30, such as n is 1, 2, 3, 4, 5 or 6, preferably n is 0 or 1); and
[0104] R^{L} is H, a ligand, a linker covalently bonded to one or more ligands, aliphatic and aromatic alkyl, alkylester, alkylamine, dimethylamino alkyl, alkylether, alkylthioether, heteroaromatic alkyl, allyl, vinyl, alkyl groups functionalized with disulfide, oxime, ketone, acetal, hemiacetal, cleavable peptides, or cleavable sugars.

[0105] In some embodiments of any one of the aspects described herein, the nucleoside of Formula (II-Eb) is of Formula (II-Ef):

[chemical structure]

[0106] In some embodiments of any one of the aspects described herein, the nucleoside of Formula (II-Ec) is of Formula (II-Eg):

[chemical structure]

[0107] In some embodiments of the various aspects described herein, R⁵ is not morpholin-4-yl unless R²⁴ and R₂₂ taken together are 4′-C(R¹⁰R¹¹)ᵥ—Y-2′ or 4′-Y—C(R¹⁰R¹¹)ᵥ-2′.

[0108] In some embodiments of the various aspects described herein, when R²² is H, hydroxyl, protected hydroxyl, alkoxy, or halogen; R²³ is a bond to a internucleotide linkage to a subsequent nucleoside; R²⁴ is H; and X^{S} is O, then R⁵ is not morpholin-4-yl.

[0109] In yet another aspect, provided herein is a double-stranded nucleic acid comprising a first strand and a second strand complementary to the first strand, and wherein at least one of the first and second strand is an oligonucleotide comprising a nucleoside of Formula (II) described herein.

[0110] In some embodiments of the various aspects described herein, the double-stranded nucleic acid comprises a first strand and a second strand complementary to the first strand, wherein one of the first stand and second strand is an oligonucleotide comprising a nucleoside of Formula (II) described herein, and the other strand comprises on its 5′-end a vinylphosphonate group (VP) group (e.g., *═CH—X^{P}, X^{P} is a phosphate group and * is C5′), C₃₋₆ cycloalkylphosphonate (e.g., cyclopropylphosphonate), monophosphate ((HO)₂(O) P—O-5′), diphosphate ((HO)₂(O) P—O—P(HO)(O)—O-5′), triphosphate ((HO)₂(O) P—O—(HO)(O) P—O—P(HO)(O)—O-5′); monothiophosphate (phosphorothioate, (HO)2(S) P—O-5′), monodithiophosphate (phosphorodithioate; (HO)(HS)(S) P—O-5′), phosphorothiolate ((HO)2(O) P—S-5′); alpha-thiotriphosphate; beta-thiotriphosphate; gamma-thiotriphosphate; phosphoramidates ((HO)₂(O) P—NH-5′, (HO)(NH₂)(O) P—O-5′), alkylphosphonates [(R^{P})(OH)(O) P—O-5′, R^{P} is optionally substituted C₁₋₃₀ alkyl, e.g., methyl, ethyl, isopropyl, or propyl)], alkyletherphosphonates [(R^{P1})(OH)(O) P—O-5′, R^{P1} is alkoxyalkyl, e.g., methoxymethyl (CH₂OMe) or ethoxymethyl], (HO)₂(X) P—O[—(CH₂)ₐ—O—P(X)(OH)—O]_{b}-5′ or (HO)₂(X) P—O[—(CH₂)ₐ—P(X)(OH)—O]_{b}-5′ or (HO)₂(X) P—[—(CH₂)ₐ—O—P(X)(OH)—O]_{b}-5′, or optionally substituted alkyl, and dialkyl terminal phosphates and phosphate mimics (e.g., HO[—(CH₂)ₐ—O—P(X)(OH)—O]_{b}-5′, H₂N[—(CH₂)ₐ—O—P(X)(OH)—O]-5′, H[—(CH₂)ₐ—O—P(X)(OH)—O]_{b}-5′, Me₂N[—(CH₂)ₐ—O—P(X)(OH)—O]_{b}-5′, HO[—(CH₂)ₐ—P(X)(OH)—O]_{b}-5′, H₂N[—(CH₂)ₐ—P(X)(OH)—O]_{b}-5′, H[—(CH₂)ₐ—P(X)(OH)—O]_{b}-5′, Me₂N[—(CH₂)ₐ—P(X)(OH)—O]_{b}-5′, wherein X is O or S; and a and b are each independently 1-10. For example, the double-stranded nucleic acid comprises a first strand and a second strand complementary to the first strand, wherein one of the first stand and second strand is an oligonucleotide comprising a nucleoside of Formula (II) described herein, and the other strand comprises on its 5′-end a vinylphosphonate group, e.g., an E-vinylphosphonate group.

[0111] In some embodiments of any one of the aspects described herein, a nuclease resistant modification is a nucleoside of Formula (II).

[0112] In some embodiments of any one of the aspects described herein, an oligonucleotide described herein comprises at least one, e.g., 2, 3, 4, 5, 6, 7, 8, 9, 10 or more phosphorothioate internucleoside linkages. For example, the oligonucleotide comprises at least 4 phosphorothioate internucleoside linkages, such as at least 6 phosphorothioate internucleoside linkages or at least 8 phosphorothioate internucleoside linkages.

[0113] In some embodiments of any one of the aspects described herein, the dsRNA comprises at least one, e.g., 2, 3, 4, 5, 6, 7, 8, 9, 10 or more phosphorothioate internucleoside linkages. For example, the dsRNA comprises at least 4 phosphorothioate internucleoside linkages, such as at least 6 phosphorothioate internucleoside linkages or at least 8 phosphorothioate internucleoside linkages.

[0114] It is noted that the phosphorothioate internucleoside linkages can be present in one strand or both strands. Further, the phosphorothioate internucleoside linkages can be present anywhere in the strand. For example, the phosphorothioate internucleoside linkages can be present at one end of the strand, at both ends of the strand, both at one end and at internal positions of the strand, or at both ends and at internal positions of the strand. Preferably, the phosphorothioate internucleoside linkages are present at both ends of the strand.

[0115] In some embodiments, the antisense strand comprises at least one, e.g., two, three, four or more phosphorothioate internucleoside linkages. For example, the antisense strand comprises 4 or more phosphorothioate internucleoside linkages. In some embodiments of any one of the aspects described herein, the antisense strand comprises a phosphorothioate internucleoside linkage between positions 1 and 2, counting from the 3′-end of the strand, and a phosphorothioate internucleoside linkage between positions 1 and 2, counting from the 5′-end of the strand. In yet some other embodiments of any one of the aspects described herein, the antisense strand comprises a phosphorothioate internucleoside linkage between positions 1 and 2, and between positions 2 and 3, counting from the 3′-end of the strand, and a phosphorothioate internucleoside linkage between positions 1 and 2, counting from the 5′-end of the strand. In still some other embodiments of any one of the aspects described herein, the antisense strand comprises a phosphorothioate internucleoside linkage between positions 1 and 2, and between positions 2 and 3, counting from the 3′-end of the strand, and a phosphorothioate internucleoside linkage between positions 1 and 2, and between positions 2 and 3, counting from the 5′-end of the strand. In yet still some other embodiments of any one of the aspects described herein, the antisense strand comprises a phosphorothioate internucleoside linkage between positions 1 and 2, between positions 2 and 3, and between positions 3 and 4, counting from the 3′-end of the strand, and a phosphorothioate internucleoside linkage between positions 1 and 2, counting from the 5′-end of the strand. In some embodiments of any one of the aspects described herein, the antisense strand comprises a phosphorothioate internucleoside linkage between positions 1 and 2, counting from the 3′-end of the strand, and a phosphorothioate internucleoside linkage between positions 1 and 2, and between positions 2 and 3, counting from the 5′-end of the strand. In yet other embodiments of any one of the aspects described herein, the antisense strand comprises a phosphorothioate internucleoside linkage between positions 1 and 2, counting from the 3′-end of the strand, and a phosphorothioate internucleoside linkage between positions 1 and 2, between positions 2 and 3, and between positions 3 and 4, counting from the 5′-end of the strand.

[0116] Like the antisense strand, the sense strand can also comprise one or more, e.g., two, three, four or more phosphorothioate internucleoside linkages. For example, the sense strand comprises a phosphorothioate internucleoside linkage between positions 1 and 2, counting from 5′-end of the strand. In some embodiments of any one of the aspects described herein, the sense strand comprises a phosphorothioate internucleoside linkage between positions 1 and 2, counting from 5′-end of the strand, and between positions 1 and 2, counting from 3′-end of the strand.

[0117] In yet some embodiments of any one of the aspects described herein, the sense strand comprises a phosphorothioate internucleoside linkage between positions 1 and 2, and between positions 2 and 3, counting from 5′-end of the strand. For example, the sense strand comprises a phosphorothioate internucleoside linkage between positions 1 and 2, and between positions 2 and 3, counting from 5′-end of the strand, and between positions 1 and 2, and between positions 2 and 3, counting from 3′-end of the strand.

[0118] In some embodiments of any one of the aspects described herein, the antisense and the sense strand can be independently at least about 18, e.g., about 19, about 20, about 21, about 22, about 23, about 24, about 25, about 26, about 27, about 28, about 29, about 30 or more, nucleotides in length. For example, the antisense strand is about 20, about 21, about 22, about 23, about 24, about 25 or about 26 nucleotides in length. In some embodiments of any one of the aspects described herein, the antisense strand is about 22, about 23 or about 25 nucleotides in length.

[0119] Similar to the antisense strand, in some embodiments of any one of the aspects described herein, the sense strand is at least about 16, e.g., about 17, about 18, about 19, about 20, about 21, about 22, about 23, about 24, about 25, about 26, or more, nucleotides in length. For example, the sense strand is about 19, about 20, about 21, about 22, about 23, about 24 or about 25 nucleotides in length. In some embodiments of any one of the aspects described herein, the sense strand is about 21 nucleotides in length.

[0120] In some embodiments of any one of the aspects described herein, the antisense strand is 22, 23 or 25 nucleotides in length and the sense strand is 21 nucleotides in length.

[0121] In some embodiments of any one of the aspects described herein, the sense strand is 15 nucleotides in length and the antisense strand is 18, 19, 20, 21, or 22 (e.g., 20) nucleotides in length. In some embodiments of any one of the aspects described herein, the sense strand is 19 nucleotides in length and the antisense strand is 19, 20, or 21 nucleotides in length. In some embodiments of any one of the aspects described herein, the sense strand is 20 nucleotides in length and the antisense strand is 20, 21, or 22 nucleotides in length. In some embodiments of any one of the aspects described herein, the sense strand is 21 nucleotides in length and the antisense strand is 21, 22, or 23 nucleotides in length. In some embodiments of any one of the aspects described herein, the sense strand is 20-24 (e.g., 22) nucleotides in length and the antisense strand is 34-38 (e.g. 36) nucleotides in length.

[0122] In some embodiments of the various aspects described herein, the double-stranded region of the dsRNA can be at least about 18, e.g., about 19, about 20, about 21, about 22, about 23, about 24, about 25 or more base-pairs, for example, a double-stranded region of about 21 base-pairs.

[0123] In some embodiments of any one of the aspects described herein, the antisense strand is about 21, about 22, about 23, about 24 or about 25 nucleotides in length, the sense strand is about 21 nucleotides in length, and the dsRNA comprises a double-stranded region of at least 18, e.g., 19, 20 or 21 base-pairs, such as 21 base-pairs.

[0124] Generally, a ligand is linked to the 3′-end of the antisense strand. The ligand can be linked to any available position of the nucleotide at the 3′-end, i.e., nucleotide at position 1 (counting 3′-end) of the antisense strand. For example, the ligand can be attached to the 3′-hydroxyl, 2′-hydroxyl (if present), or a position in the nucleobase. In some embodiments of any one of the aspects described herein, the ligand is linked to 3′-hydroxyl of the nucleotide at position 1, counting from 3′-end, of antisense strand. The ligand can be linked directly, i.e., via a bond, or by a linker to the 3′-end of the antisense strand.

[0125] It is noted that the ligand or the linker attached to the ligand can be linked to the 3′-end of the antisense strand via any modified or unmodified internucleoside linkage known and available in the art. For example, the ligand or the linker attached to the ligand can be linked to the 3′-end of the antisense strand via any negatively charged moiety. For example, the ligand or the linker attached to the ligand can be linked to the 3′-end of the antisense strand via a phosphodiester (PO), phosphorothioate (PS), phosphorodithioate (PS2), PN (e.g., RSO₂—N═P(OH) type or (HO) P—NHR or (HO) P—NR₂, each where R includes, but is not limited to, an aliphatic (e.g., C1-20 alkyl), cycloaliphatic, heterocyclic, aromatic, or heteroaromatic group, each of which may be optionally substituted; or where both R groups, together with the nitrogen to which they are attach form a 4-10 membered monocyclic heterocyclic or bicyclic heterocyclic group, the heterocyclic group optionally having 1 or 2 additional heteroatoms selected from O, N, and S, and where heterocyclic group is optionally substituted. Optional substituents can be one or more (e.g., 1, 2, or 3 groups) independently selected from the group consisting of halogen, cyano, nitro, azido, hydroxy, amino, carboxy, oxo (═O), thia (═S), imino (═N(H)), C₁₋₆alkylimino (═N(R)), C₁₋₆alkylamino (R(H) N—), diC₁₋₆alkylamino (R₂N—), C₁₋₆alkyl, C₁₋₆alkoxy, C₁₋₆acyl (RC(O)—), C₁₋₆alkylester (ROC(O)—), amido (H₂NC(O)—), C₁₋₆alkylamide (R(H) NC(O)—), diC₁₋₆alkylamide (R²NC(O)—), C₁₋₆ acylamino (RC(O)N(H)—) linkage.

[0126] In some embodiments of any one of the aspects described herein, the ligand or linker attached to the ligand is linked to the 3′-end of the antisense strand via a phosphorothioate internucleoside linkage.

[0127] Linker can be selected in order to position the ligand it away from the PAZ domain of Ago. Accordingly, in some embodiments of any one of the aspects described herein, the linker connecting the ligand to the 3′-end of the antisense strand is from about 5 Angstroms to about 250 Angstroms in length. For example, the linker connecting the ligand to the 3′-end of the antisense strand is from about 10 Angstroms to about 200 Angstroms length, e.g., from about 15 Angstroms to about 150 Angstroms, from about 20 Angstroms to about 100 Angstroms, from about 25 Angstroms to about 75 Angstroms, from about 5 Angstroms to about 50 Angstroms, from about 10 Angstroms to about 40 Angstroms or from about 20 Angstroms to about 30 Angstroms in length.

[0128] In some embodiments of any one of the aspects described herein, the linker has a chain length of at least 6 atoms. For example, the linker has a chain length of at least 7, 8, 9, 10, 11, 12, 13, 14, 15, 16, 17, 18, 19, 20, 21, 22, 23, 24, 25, 26, 27, 28, 29, 30 or more atoms). In some embodiments of any one of the aspects described herein, the linker has a chain length of 6, 7, 8, 9, 10, 11, 12, 13, 14, 15, 16, 17, 18, 19, 20, 21, 22, 23, 24, 25, 26, 27, 28, 29 or 30 atoms.

[0129] In some embodiments of any one of the aspects described herein, the ligand is linked to the 3′-end of the antisense strand via a linker. For example, the ligand is linked to the 3′-end of the antisense strand via a hydrophobic linker.

[0130] In embodiments of the various aspects described herein, the linker can comprise a carrier connected to a carrier. In some embodiments, the carrier comprises a hydrogen-bonding acceptor (e.g., a tertiary amide or tertiary amine). In some embodiments, the carrier comprises a pyrrolidine ring.

[0131] The inventors have discovered inter alia pharmacokinetic (PK)/pharmacodynamic (PD) properties of the dsRNAs comprising a ligand linked to the 3′-end of the antisense strand can be improved by including a second ligand in the dsRNAs. Accordingly, in some embodiments of any one of the aspects described herein, the dsRNA comprises a second ligand. The second ligand can be attached or linked to the sense strand or the antisense strand. Preferably, the second ligand is linked to the sense strand. In some embodiments of any one of the aspects described herein, the second ligand is linked to 3′-end of the sense strand. In some other embodiments of any one of the aspects described herein, the second ligand is linked to 5′-end of the sense strand. It is noted that the ligand linked to the antisense strand and second ligand can be same or different. Preferably, the ligand linked to the antisense strand and second ligand are different.

[0132] Embodiments of the various aspects described herein, include a ligand, such as a targeting ligand, a PK modulator, or an endosomolytic ligand. Accordingly, the ligand linked to the 3′-end of the antisense strand can be a targeting ligand, PK modulator or an endosomolytic ligand. Preferably, the ligand linked to the 3′-end of the antisense strand is a targeting ligand, e.g., mono- or multi-valent N-acetylgalactosamine (GalNac).

[0133] When present, the second ligand can be a targeting ligand, PK modulator or an endosomolytic ligand. For example, second ligand is a ligand capable of binding to a serum protein, e.g., serum albumin. Exemplary ligands capable of binding with serum albumin include, but are not limited to, iodipamide, azapropazone, indomethacin, tiblone (TIB), 3-carboxy-4-methyl-5-propyl-2-furanpropanoic acid (CMPF), DIS, oxyphenbutazone, phenylbutazone, warfarin, indoxyl sulfate, diflunisal, halothane, ibuprofen, and diazepam, propofol.

[0134] In some embodiments of any one of the aspects described herein, the ligand linked to the sense strand, i.e., the second ligand is a PK modulator.

[0135] In some embodiments of any one of the aspects described herein, the ligand linked to the sense strand, i.e., the second ligand is a mannose receptor ligand (e.g., multivalent mannose).

[0136] In some embodiments of any one of the aspects described herein, the ligand linked to the sense strand, i.e., the second ligand is a folic acid ligand.

[0137] In some embodiments of any one of the aspects described herein, the ligand linked to the 3′-end of the antisense strand is a targeting ligand, e.g., mono- or multi-valent GalNAc, and the second ligand is a PK modulator, e.g., ibuprofen.

[0138] In some embodiments of any one of the aspects described herein, the ligand linked to the 3′-end of the antisense strand is a targeting ligand, e.g., mono- or multi-valent GalNAc, and the ligand linked to the sense strand is a mannose receptor ligand (e.g., mannose).

[0139] In some embodiments of any one of the aspects described herein, the ligand linked to the 3′-end of the antisense strand is a targeting ligand, e.g., mono- or multi-valent GalNAc, and the ligand linked to the sense strand is a folic acid ligand.

[0140] In embodiments of any one of the aspects described herein, each ligand can be selected independently from the group consisting of peptides, centyrins, antibodies (e.g., antiCD-4 antibodies and antiCD-117 antibodies), antibody fragments, T-cell targeting ligands, B-cell targeting ligands, cancer cell targeting ligands (e.g., DUPA, folate, and RGD), spleen targeting functionalities, lung targeting functionalities, bone marrow targeting functionalities, phage display peptides, cell permeation peptides (CPPs), integrin ligands, multianionic ligands, multicationic ligands, monovalent and multivalent carbohydrates (e.g., GalNAc, mannose, mannose-6 phosphate, mucose, and mlucose), kidney targeting ligands, BBB penetration ligands, lipids, and amino acids (e.g., L-amino acids, D-amino acids, and β-amino acids).

[0141] It is noted that the double-stranded RNAs described can comprise one or more additional nucleic acid modifications such as nucleobase modifications, sugar modifications, inter-sugar linkage modifications, or any combination thereof. Accordingly, in some embodiments of any one of the aspects described herein, dsRNA comprises at least one, e.g., 2, 3, 4, 5, 6, 7, 8, 9, 10 or more 2′-fluoro nucleotides. For example, the antisense strand and/or the sense stand comprises independently at least one, e.g., 2, 3, 4, 5 or more 2′-fluoro nucleotides.

[0142] In some embodiments of any one of the aspects described herein, the antisense strand comprises a 2′-fluoro nucleotide at positions 2, 14 and 16, counting from the 5′-end of the antisense strand. For example, the antisense strand comprises a 2′-fluoro nucleotide at positions 2, 6, 14 and 16, counting from the 5′-end of the antisense strand. In another non-limiting example, the antisense strand comprises a 2′-fluoro nucleotide at positions 2, 6, 9, 14 and 16, counting from the 5′-end of the antisense strand. In some further examples, the antisense strand comprises a 2′-fluoro nucleotide at positions 2, 6, 8, 9, 14 and 16, counting from the 5′-end of the antisense strand.

[0143] In some embodiments of any one of the aspects described herein, the antisense strand comprises a 2′-fluoro nucleotide at positions 2, 5, 7, 12, 14 and 16 counting from the 5′-end of the antisense strand.

[0144] In some embodiments of any one of the aspects described herein, the sense strand comprises a 2′-fluoro nucleotide at positions 7, 9 and 11, counting from the 5′-end of the sense strand or at positions 11, 13 and 15, counting from the 3′-end of the sense strand. For example, the sense strand comprises a 2′-fluoro nucleotide at positions 7, 9, 10 and 11, counting from the 5′-end of the sense strand or at positions 11, 12, 13 and 15, counting from the 3′-end of the sense strand.

[0145] In some embodiments of any one of the aspects described herein, the sense strand comprises a 2′-fluoro nucleotide at positions 9, 10, and 11, counting from the 5′-end of the sense strand or at positions 11, 12, and 13 counting from the 3′-end of the sense strand.

[0146] In some embodiments of any one of the aspects described herein, the antisense strand comprises a 2′-fluoro nucleotide at least at positions 2, 14 and 16, counting from the 5′-end of the antisense strand, and the sense strand comprises a 2′-fluoro nucleotide at least at positions 7, 9 and 11, counting from the 5′-end of the sense strand or at least at positions 11, 13 and 15, counting from the 3′-end of the sense strand. For example, the antisense strand comprises a 2′-fluoro nucleotide at least at positions 2, 6, 14 and 16, counting from the 5′-end of the antisense strand, and the sense strand comprises a 2′-fluoro nucleotide at least at positions 7, 9 and 11, counting from the 5′-end of the sense strand or at least at positions 11, 13 and 15, counting from the 3′-end of the sense strand. In another example, the antisense strand comprises a 2′-fluoro nucleotide at least at positions 2, 6, 9, 14 and 16, counting from the 5′-end of the antisense strand, and the sense strand comprises a 2′-fluoro nucleotide at least at positions 7, 9 and 11, counting from the 5′-end of the sense strand or at least at positions 11, 13 and 15, counting from the 3′-end of the sense strand. In yet another example, the antisense strand comprises a 2′-fluoro nucleotide at least at positions 2, 6, 8, 9, 14 and 16, counting from the 5′-end of the antisense strand, and the sense strand comprises a 2′-fluoro nucleotide at least at positions 7, 9 and 11, counting from the 5′-end of the sense strand or at least at positions 11, 13 and 15, counting from the 3′-end of the sense strand.

[0147] In some further non-limiting examples, the antisense strand comprises a 2′-fluoro nucleotide at least at positions 2, 14 and 16, counting from the 5′-end of the antisense strand, and the sense strand comprises a 2′-fluoro nucleotide at least at positions 7, 9 and 11, counting from the 5′-end of the sense strand or at least at positions 11, 12, 13 and 15, counting from the 3′-end of the sense strand. For example, the antisense strand comprises a 2′-fluoro nucleotide at least at positions 2, 6, 14 and 16, counting from the 5′-end of the antisense strand, and the sense strand comprises a 2′-fluoro nucleotide at least at positions 7, 9, 10 and 11, counting from the 5′-end of the sense strand or at least at positions 11, 12, 13 and 15, counting from the 3′-end of the sense strand. In another example, the antisense strand comprises a 2′-fluoro nucleotide at least at positions 2, 6, 9, 14 and 16, counting from the 5′-end of the antisense strand, and the sense strand comprises a 2′-fluoro nucleotide at least at positions 7, 9, 10 and 11, counting from the 5′-end of the sense strand or at least at positions 11, 12, 13 and 15, counting from the 3′-end of the sense strand. In yet another example, the antisense strand comprises a 2′-fluoro nucleotide at least at positions 2, 6, 8, 9, 14 and 16, counting from the 5′-end of the antisense strand, and the sense strand comprises a 2′-fluoro nucleotide at least at positions 7, 9, 10 and 11, counting from the 5′-end of the sense strand or at least at positions 11, 12, 13 and 15, counting from the 3′-end of the sense strand.

[0148] The dsRNAs described herein can comprise one or more, e.g., 2, 3, 4, 5, 6, 7, 8, 9, 10 or more 2′-deoxy (i.e., 2′-H or DNA) nucleotides. For example, the antisense strand and/or the sense stand comprises independently at least one, e.g., 2, 3, 4, 5 or more 2′-deoxy (i.e., 2′-H or DNA) nucleotides.

[0149] In some embodiments of any one of the aspects described herein, the antisense strand comprises a DNA nucleotide at positions 2, 5, 7, and 12 counting from the 5′-end of the antisense strand. In some embodiments of any one of the aspects described herein, the antisense strand comprises a DNA nucleotide at positions 2, 5, 7, 12, and 14 counting from the 5′-end of the antisense strand. In some embodiments of any one of the aspects described herein, the antisense strand comprises a DNA nucleotide at positions 2, 5, 7, 12, 14 and 16 counting from the 5′-end of the antisense strand.

[0150] In some embodiments of any one of the aspects described herein, the antisense strand comprises a DNA nucleotide at positions 2, 5, 7 and 12, counting from the 5′-end of the antisense strand; and a 2′-fluoro nucleotide at position 14 of the antisense strand.

[0151] The dsRNAs described herein can comprise one or more, e.g., 2, 3, 4, 5, 6, 7, 8, 9, 10 or more 2′-OMe nucleotides. For example, the antisense strand and/or the sense stand comprises independently at least one, e.g., 2, 3, 4, 5 or more 2′-OMe nucleotides. In some embodiments of any one of the aspects described herein, all remaining nucleotides, i.e., other than modifications specified herein, in the antisense strand are 2′-OMe nucleotides. Similarly, in some embodiments of any one of the aspects described herein, all remaining nucleotides, i.e., other than modifications specified herein, in the antisense strand are 2′-OMe nucleotides.

[0152] In some embodiments of any one of the aspects described herein, the antisense strand comprises a phosphate group or a phosphate analog or derivative thereof at its 5′-end. For example, the antisense strand comprises a 5′-vinylphosphonate nucleotide at its 5′-end. For example, the antisense strand comprises a 5′-E-vinylphosphanate nucleotide at its 5′-end.

[0153] In some embodiments of any one of the aspects described herein, the dsRNA comprises at least one, e.g., 2, 3, 4, 5, 6, 7, 8, 9, 10 or more locked nucleic acid (LNA) or bridged nucleic acid (BNA) nucleotides. For example, the antisense and/or the sense strand comprises independently at least one, e.g., 2, 3, 4, 5 or more LNA or BNA nucleotides.

[0154] In some embodiments of any one of the aspects described herein, the dsRNA comprises at least one, e.g., 2, 3, 4, 5, 6, 7, 8, 9, 10 or more cyclohexene nucleic acid (CeNA) nucleotides. For example, the antisense and/or the sense strand comprises independently at least one, e.g., 2, 3, 4, 5 or more CeNA nucleotides.

[0155] In some embodiments of any one of the aspects described herein, the dsRNA comprises at least one, e.g., 2, 3, 4, 5, 6, 7, 8, 9, 10 or more thermally stabilizing modification. For example, the antisense and/or the sense strand comprises independently at least one, e.g., 2, 3, 4, 5 or more thermally stabilizing modification.

[0156] In some embodiments of any one of the aspects described herein, the dsRNA comprises at least one, e.g., 2, 3, 4, 5, 6, 7, 8, 9, 10 or more abasic nucleotides. For example, the antisense and/or the sense strand comprises independently at least one, e.g., 2, 3, 4, 5 or more abasic nucleotides.

[0157] In some embodiments of any one of the aspects described herein, the dsRNA comprises at least one, e.g., 2, 3, 4, 5, 6, 7, 8, 9, 10 or more 2′-deoxy nucleotides. For example, the antisense and/or the sense strand comprises independently at least one, e.g., 2, 3, 4, 5 or more 2′-deoxy nucleotides. In some embodiments, the antisense strand comprises one or more, e.g., one, two or more 2′-deoxy nucleotides in the single-stranded overhang.

[0158] In some embodiments of any one of the aspects described herein, the dsRNA comprises at least one, e.g., 2, 3, 4, 5, 6, 7, 8, 9, 10 or acyclic (e.g., unlocked nucleic acid (UNA), glycol nucleic acid (GNA) or(S)-glycol nucleic acid (S-GNA)) nucleotides. For example, the antisense and/or the sense strand comprises independently at least one, e.g., 2, 3, 4, 5 or more UNA and/or GNA nucleotides.

[0159] In some embodiments of any one of the aspects described herein, the dsRNA comprises at least one, e.g., 2, 3, 4, 5, 6, 7, 8, 9, 10 or thermally destabilizing modifications. For example, the antisense and/or the sense strand comprises independently at least one, e.g., 2, 3, 4, 5 or more thermally destabilizing modifications. Some exemplary thermally destabilizing modifications include, but are not limited to, abasic nucleotides, 2′-deoxy nucleotides, acyclic nucleotides (e.g., UNA, GNA and(S)-GNA), 2′-5′ linked nucleotides (3′-RNA), threose nucleotides (TNA), 2′ gem Me/F nucleotides, and a mismatch with the opposing nucleotide in the other strand.

[0160] In some embodiments of any one of the aspects described herein, the antisense strand comprises at least one thermally destabilizing modification in the seed region (i.e., positions 2-9 from the 5′-end) of the antisense strand. For example, the antisense strand comprises a thermally destabilizing modification at least at one of positions 6, 7 or 8, counting from the 5′-end of the strand. In some embodiments of any one of the aspects described herein, the antisense strand comprises a thermally destabilizing modification at position 7, counting from the 5′-end of the strand.

[0161] The double-stranded nucleic acid can comprise blunt ends and/or single-stranded overhangs at the end. For example, the double-stranded nucleic acid can comprise comprises a blunt end at 5′-end of the antisense strand. In another example, the double-stranded nucleic acid can comprise comprises a 1-5 nucleotide single-stranded overhang at 3′-end of the antisense strand, e.g., the 3′-end of the antisense strand extends past the 5′-end of the sense strand.

[0162] In another aspect, provided herein is a pharmaceutical composition comprising an oligonucleotide or dsRNA molecule described herein alone or in combination with a pharmaceutically acceptable carrier or excipient.

[0163] In yet another aspect, provided herein is a cell comprising an oligonucleotide or dsRNA molecule described herein.

[0164] In still another aspect, provided herein is a gene silencing kit comprising an oligonucleotide or dsRNA molecule described herein.

[0165] Also, provided herein is a method for silencing a target gene, in a cell. The method comprises a step of introducing: (i) a dsRNA molecule described herein into the cell, where one of the strands, e.g., the antisense of the dsRNA comprises a nucleotide sequence substantially complementary to a nucleotide sequence of the target gene; and/or (ii) an oligonucleotide described herein, wherein the oligonucleotide comprises a nucleotide sequence substantially complementary to a nucleotide sequence of the target gene.

[0166] In another aspect, provided herein is a method for inhibiting or reducing the expression of a target gene in a subject. The method comprises administering to the subject: (i) a dsRNA molecule described herein, where one of the strands, e.g., the antisense of the dsRNA comprises a nucleotide sequence substantially complementary to a nucleotide sequence of the target gene; and/or (ii) an oligonucleotide described herein, wherein the oligonucleotide comprises a nucleotide sequence substantially complementary to a nucleotide sequence of the target gene.

### BRIEF DESCRIPTION OF THE DRAWINGS

[0167] FIGS. 1A and 1B are schematics of siRNAs with GalNAc conjugated at the 3′ end of sense strand (FIG. 1A) and the 3′ end of antisense strand (FIG. 1B). Deoxythymine residues are indicated by blue, 2′-fluoro is indicated in green, 2′-O-methyl in black. Phosphorothioate linkages are indicated by orange lines.

[0168] FIG. 1C depicts the chemical structure of the GalNAc ligand.

[0169] FIG. 2 shows ASGPR binding affinities of the conjugated GalNAc moieties to siRNA.

[0170] FIGS. 3A-3C are graphs showing in vitro activity of siRNAs targeting mTTR (FIG. 3A), C5 (FIG. 3B) and FXII (FIG. 3C) by transfection (upper panels) or free uptake (lower panels).

[0171] FIG. 4 is a bar graph showing siRNA with GalNAc conjugated to the 3′ end of the antisense strand is effective in vivo. Percentage of TTR protein in circulation after treatment of mice with GalNAc conjugates I or II relative to PBS-treated control mice (n=3). Blood samples were drawn 4 days (violet) and 7 days (green) post-dose, and TTR protein levels were quantified by ELISA. Serum TTR protein levels from individual animals were normalized to PBS-treated control group and are expressed as the mean±standard deviation.

[0172] FIG. 5 shows relative TTR protein in circulation after treatment with GalNAc conjugates II and VII relative to pre-dose levels. The siRNAs are shown schematically above the graph. Locations of phosphorothioate linkages are indicated by orange lines. C57BL/6 mice were treated subcutaneously with 1 mg/kg II (blue) and 0.5 (green), 1 (red), and 2.5 (brown) mg/kg VII (n=3). Blood samples were drawn 4, 7, 10, 14, and 21 days post-dose, and TTR was quantified by ELISA. Serum TTR protein levels from individual animals were normalized to pre-dose level and are expressed as the mean±standard deviation.

[0173] FIGS. 6A and 6B are graphs showing percentage of TTR protein in circulation after treatment with GalNAc conjugates I (blue), II (orange), and VIII (violet) compared to pre-dose levels in C57BL/6 mice (n=3). The siRNAs are shown schematically to the right. Mice were treated subcutaneously with (FIG. 6A) 2.5 mg/kg and (FIG. 6B) 1 mg/kg. Blood samples were drawn 7, 14, 21, and 28 days post-dose, and TTR protein was quantified by ELISA. Serum TTR protein levels from individual animals were normalized to pre-dose level and are expressed as the mean±standard deviation.

[0174] FIGS. 7B and 7C are graphs showing percentage of TTR protein in circulation after treatment with GalNAc conjugates II (blue), IX (orange), and X (violet) compared to pre-dose levels in C57BL/6 mice (n=3). Mice were treated subcutaneously with (FIG. 7A) 2.5 mg/kg or (FIG. 7B) 1.0 mg/kg. Blood samples were drawn 7, 14, 21, and 28 day post-dose, and TTR protein was quantified by ELISA. Serum TTR protein levels from individual animals were normalized to pre-dose level and are expressed as the mean±standard error.

[0175] FIG. 8A shows liver siRNA levels after single subcutaneous administration of 1 mg/kg siRNA in wild-type C57BL/6 mice. Livers were collected five days post-dose and siRNA levels were quantified by RT-qPCR. Sense strand (blue) and antisense strand (red) levels were evaluated. Data are expressed as the mean+/−standard deviation.

[0176] FIG. 8B depicts Ago2-loaded siRNA levels after single subcutaneous administration of 1 mg/kg siRNA in wild-type C57BL/6 mice. Livers were collected five days post-dose and siRNA levels in Ago2 were quantified by RT-qPCR. Sense strand (blue) and antisense strand (red) levels were evaluated. Data are expressed as the mean+/−standard deviation.

[0177] FIG. 8C is a comparison of mTTR mRNA knockdown in liver after single SC administration of siRNA I, VIII, II and VII in wild-type C57BL/6 mice; results are presented as % mTTR mRNA remaining in liver after single dose SC administration at 1 mg/kg.

[0178] FIGS. 9A and 9B show that duplex (XIV) shows better efficacy and longer duration of action compared to (II), (XIII), (XI) and (XII) after 42 day; (FIG. 9A) 2.5 mg/kg (FIG. 9B) 1.0 mg/kg. Chemistry used: 3′-GalNAc in antisense strand, 8PS for II and XI-XIV.

[0179] FIG. 10 is a bar-graph showing relative TTR protein in circulation after treatment with GalNAc conjugates XV and XVI relative to pre-dose levels. The siRNAs are shown schematically above the graph. Locations of phosphorothioate linkages are indicated by orange lines. C57BL/6 mice were treated subcutaneously with 1 mg/kg XV (blue) and 0.5 (green), 1 (red), and 2.5 (brown) mg/kg XVI (n=3). Blood samples were drawn 4, 7, 10, 14, and 21 days post-dose, and TTR was quantified by ELISA. Serum TTR protein levels from individual animals were normalized to pre-dose level and are expressed as the mean±standard deviation.

[0180] FIG. 11A depicts in vivo gene silencing of 3′-AS GalNAc (6PS and 8PS) conjugates of C5 siRNAs: PD observed on Day 5. Comparison of gene silencing of conjugates III, IV and XVII in wild-type C57BL/6 mice (n=3); results are presented as % C5 protein remaining in circulation after single dose SC administration at 1 mg/kg dose, relative to pre dose. Blood samples were drawn 5 day post-dose for C5 protein evaluation by ELISA. Serum C5 protein levels from individual animals were normalized to pre-dose level and are expressed as the mean±standard error. Chemistry used in FIGS. 11A-11C: Parent 3′-GalNAc in sense strand (parent control), 6PS for III; 3′-GalNAc in antisense strand, 8PS for IV; and 3′-GalNAc in antisense strand, 6PS for XVII.

[0181] FIG. 11B shows tissue levels of siRNA-GalNAc conjugates in liver at 24 h after a single 1 mg/kg subcutaneous dose (SC, SD) in C57BL/6 mice (n=3). siRNA levels were determined using a PCR-based assay¹⁵.

[0182] FIG. 11C shows in vivo Ago2 loading of siRNA.

[0183] FIG. 12 shows docking of GalNAc linker attached to 3′-end of siRNA guide strand interacting with PAZ domain. The linker is positioned away from PAZ domain, which explains how GalNAc is accommodated in PAZ domain, hydroxyproline is stabilized within PAZ domain

[0184] FIG. 13A-13C show results of in vitro experiments (FIG. 13A) and in vivo study (FIGS. 13B and 13C). Both single stranded siRNA XIX and XX were dosed to wild type C57BL/6 mice for mouse transthyretin mRNA (mTTR) through single subcutaneous administration at 3.0 (FIG. 13B) and at 10.0 mg/kg (FIG. 13C) to observe dose response. Levels of circulating mTTR protein were analyzed after 3, 7, and 14-day post-dose.

[0185] FIG. 14 is a schematic representation of the design of an exemplary chemically modified siRNA.

[0186] FIG. 15 depicts some exemplary chemically modified siRNAs with GalNAc conjugated at 3′-end of antisense and sense strands.

[0187] FIGS. 16A and 16B are graphs showing the evaluation architecture shows (XIV) as the best construct at 2.5 mg/kg (FIG. 16A) and at 1.0 mg/kg (FIG. 16B).

[0188] FIGS. 17A and 17B depict activity single-stranded siRNAs. Both single strands siRNA XIX and XX were dosed to wild type C57BL/6 mice for mouse transthyretin mRNA (mTTR) through single subcutaneous administration at 3.0 (FIG. 17A) and at 10.0 mg/kg (FIG. 17B) to observe dose response. Levels of circulating mTTR protein were analyzed after 3, 7, and 14-day post-dose.

[0189] FIG. 18 depicts experiment design for evaluating the impact of ibuprofen ligands on conjugate efficacy and PK.

[0190] FIG. 19 depicts in vivo activity of GalNAc-Ibuprofen conjugates in wild-type mice. SEQ ID NOs are shown in Table 19.

[0191] FIG. 20 depicts the binding of ibuprofen conjugated siRNAs to human serum albumin (HAS). SEQ ID NOs are shown in Table 19.

[0192] FIG. 21 shows the PK/PD analysis of GalNAc vs GalNAc-Ibuprofen conjugate carrying hydrophobic PK-enhancers (albumin binding-ibuprofen).

[0193] FIG. 22 depicts different oligonucleotide sequences.

[0194] FIG. 23 shows in vivo TTR protein levels in serum samples over a 42-day period after subcutaneous (sc) administration of siRNAs with different ligands on the 5′ and 3′ end.

[0195] FIG. 24 shows in vivo TTR protein level in serum samples over a 42-day period after intravenous (iv) administration of siRNAs with different ligands on the 5′ and 3′ end.

[0196] FIGS. 25A-25E depict exemplary ligands. FIG. 25A shows different examples of ligands and representative L groups. FIG. 25B shows some exemplary ligand aldehydes. FIG. 25C shows some exemplary ligand acids. FIG. 25D shows some exemplary multivalent mannose based ligands, including acid for tri- and hexavalent mannose, aldehyde for tri- and hexavalent mannose, acid for hexa- and multivalent mannose, and aldehyde for hexa- and multivalent mannose. FIG. 25E shows multivalent mannose based ligands, including acid for hexa- and multivalent mannose, aldehyde for hexa- and multivalent mannose, acid for multivalent mannose, and aldehyde for multivalent mannose.

[0197] FIG. 26 shows different sense(S) and antisense (AS) strands with different ligands on the 5′ and 3′ end.

[0198] FIGS. 27-32 depict some exemplary embodiments of the disclosure.

[0199] FIG. 33 depicts some exemplary embodiments of the disclosure.

[0200] FIG. 34 is a bar graph showing modification of the sense strand with a phosphorylation blocker enhances silencing in mice. Mice (n=3 per group) were treated with a single dose (3 mg kg-1) of siRNA I, III, IV, or V targeting Apob (Table 10). The levels of circulating Apob protein were quantified at 3, 7, 14, and 21 days. Levels were normalized to Gapdh, and data are expressed as percent of Apob in the PBS-treated control animals.

[0201] FIG. 35 is a bar graph showing modification of antisense strands with Mo1 or Mo2 inhibits silencing. Mice (n=3 per group) were treated with a single dose (3 mg kg-1) of siRNA II, VI, VII and VIII targeting Apob (Table 10). The levels of circulating Apob protein were quantified at 3, 7, 14, and 21 days. Apob levels were normalized to Gapdh. Data are expressed as percent of Apob in the PBS-treated control animals.

[0202] FIG. 36 is a line graph showing gene silencing activity is inhibited by Mo2 modification of the antisense strand. Percent luciferase expression in TTR reporter assay as a function of siRNA concentration. The antisense strand of the siRNA targeting TTR was modified with the indicated morpholino analog. The parent strand did not have a 5′-modification.

[0203] FIG. 37 is a bar graph showing extended morpholino modifications at the 5′ position inhibits RISC loading. Total antisense RNA bound to recombinant human Ago2 quantified by stem-loop RT-PCR.

[0204] FIGS. 38A-38H are schematic representations showing morpholino analogues disrupt interaction of the 5′ phosphate with the MID domain of Ago2. FIGS. 12A-12D depict models of Ago2 bound to strands with (FIG. 38A) Mo1,20 (FIG. 38B) Mo2, (FIG. 38C) Pip, and (FIG. 38D) Mo3. FIG. 38E depicts overlay of the complexes shown in panels FIGS. 138A-38D. FIG. 38F depicts potential hydrogen-bond formation with Mo2. FIG. 38G depicts Ago2 surface coloured according to Coulombic potential (blue positive, white neutral). FIG. 38H depicts Ago2 surface coloured according to hydrophobicity (green lowest and pink highest).

[0205] FIG. 39 is a bar graph showing 5′-morpholino modified sense, antisense and control strand selection in vivo. Mice (n=3 per group) were treated with a single dose (3 mg kg-1) of parent siRNA and, duplexes I-VIII targeting Apob (Table 10). The levels of circulating Apob protein were quantified at 3, 7, 14 and 21 days. Apob levels were normalized to Gapdh mRNA. Data are expressed as percent of Apob in the PBS-treated control animals.

[0206] FIG. 40 is a schematic representation of duplexes that target mTTR.

[0207] FIG. 41 is a schematic representation of duplexes that target F9.

[0208] FIG. 42 is a schematic representation of duplexes that target ApoB.

[0209] FIG. 43 is a schematic representation of control LNA duplexes against mTTR. SEQ ID NOs are shown in Table 19.

[0210] FIGS. 44A-44G show IC₅₀ curves in PMH via transfection of duplexes that target mTTR: AD-57727 (FIG. 44A), AD-68895 (FIG. 44B), AD-617745 (FIG. 44C), AD-617746 (FIG. 44D), AD-617747 (FIG. 44E), AD-617748 (FIG. 44F), and AD-617749 (FIG. 44G).

[0211] FIG. 45 is a line-graph showing the timecourse of serum mTTR levels relative to pre dose after administration of exemplary duplexes targeting mTTR at 1 mg/kg dose. Sense strand of the duplex comprises LNA-Morpholinos at position 1 (S1) with variation on PS number and location, and modification of the antisense strand with 5′-vinylphosphate (5′-VP).

[0212] FIG. 46 is a bargrpah showing mTTR gene expression fold change in the mouse liver 28 days after administration of exemplary duplexes targeting mTTR at 1 mg/kg dose. Sense strand of the duplex comprises LNA-Morpholinos at position 1 (S1) with variation on PS number and location, and modification of the antisense strand with 5′-VP.

[0213] FIG. 47 a line-graph showing the timecourse of serum mTTR levels relative to pre dose after administration of control duplexes targeting mTTR at 1 mg/kg dose. Sense strand of the duplex comprises LNA at position 1 (S1) with variation on PS number and location, and modification of the antisense strand with 5′-VP.

### DETAILED DESCRIPTION

[0214] It is to be understood that both the foregoing general description and the following detailed description are exemplary and explanatory only and are not restrictive of the invention, as claimed. Herein, the use of the singular includes the plural unless specifically stated otherwise. As used herein, the use of “or” means “and/or” unless stated otherwise. Furthermore, the use of the term “including” as well as other forms, such as “includes” and “included”, is not limiting. Also, terms such as “element” or “component” encompass both elements and components comprising one unit and elements and components that comprise more than one subunit, unless specifically stated otherwise.

[0215] The section headings used herein are for organizational purposes only and are not to be construed as limiting the subject matter described. All documents, or portions of documents, cited in this application, including, but not limited to, patents, patent applications, articles, books, and treatises, are hereby expressly incorporated by reference in their entirety for any purpose.

### X^{S}

[0216] In some embodiments of the various aspects described herein, X^{S} can be O, CH₂, S, or NH. For example, X^{S} can be O or CH₂. In some preferred embodiments of any one of the aspects described herein, X^{S} is O.

### R⁵

[0217] In some embodiments of the various aspects describe herein, R⁵ is -L¹-R^{H} or —O—N(R¹³)R¹⁴, where L¹ is a bond, -L³-, C₁₋₃₀alkylene, C₂₋₃₀alkenylene, C₂₋₃₀alkynylene, *-L³-C₁₋₃₀alkylene *-L³-C₂₋₃₀alkenylene, or *-L³-C₂₋₃₀alkynylene; L³ is —O—, —N(R^{L3})—, —S—, —C(O)—, —S(O)—, —S(O)₂—, —P(X^{L3})(Y^{L3}R^{L3B})—; R^{L3} is hydrogen, optionally substituted C₁₋₃₀alkyl, optionally substituted C₁-C₃₀alkoxy, C₁₋₄haloalkyl, optionally substituted C₂₋₄alkenyl, optionally substituted C₂₋₄alkynyl, optionally substituted C₁₋₃₀alkyl-CO₂H, or a nitrogen-protecting group; X^{L2} is O or S; Y^{L3} is O, S, NH, or a bond; R^{L3B} is H or optionally substituted alkyl; * is bond to R^{H}; and R^{H} is 4-8 membered heterocyclyl comprising 1, 2 or 3 heteroatoms selected independently from N, O and S, and the heterocyclyl is optionally substituted with 1, 2, 3 or 4 independently selected substituents, and, optionally, the heterocyclyl comprises at least one nitrogen atom, or R^{H} is

[chemical structure]

where X is O, NR^{L}, S, or CH₂; R^{L} is hydrogen, a ligand, a linker covalently bonded to one or more ligands, aliphatic and aromatic alkyl, alkylester, alkylamine, dimethylamino alkyl, alkylether, alkylthioether, heteroaromatic alkyl, allyl, vinyl, alkyl groups functionalized with disulfide, oxime, ketone, acetal, hemiacetal, cleavable peptides, or cleavable sugars; and R¹³ and R¹⁴ are independently -L²-R^{H2}, where L² is a linker; and R^{H2} is 4-8 membered heterocyclyl comprising 1, 2 or 3 heteroatoms selected independently from N, O and S, and the heterocyclyl is optionally substituted with 1, 2, 3 or 4 independently selected substituents, and, optionally at least one of R¹³ and R¹⁴ is -L²-R^{H2}.

[0218] In some embodiments of any one of the aspects described herein, R⁵ is -L¹-R^{H}.

[0219] In some embodiments of any one of the aspects, R⁵ is —O—N(R¹³)R¹⁴. It is noted, when R⁵ is —O—N(R¹³)R¹⁴, R¹³ and R¹⁴ can be same or different. Accordingly, in some embodiments of any one of the aspects described herein, R¹³ and R¹⁴ are same. In some embodiments of anyone of the aspects described herein, R¹³ and R¹⁴ are different.

[0220] In embodiments of the various aspects described herein, one or both of R¹³ and R¹⁴ can be -L²-R^{H2}.

[0221] In some embodiments of any one of the aspects described herein, at least one (e.g., one or both) of R¹³ and R¹⁴ is —(CH₂)ₘ—R^{H2} or

[chemical structure]

[0222] In some embodiments of any one of the aspects described herein R⁵ is N₃.

[0223] In some embodiments of any one of the aspects described herein, R⁵ is

[chemical structure]

[chemical structure]

[chemical structure]

where n is 0 an integer selected from 1 to 30 (e.g., from 1 to 20, such as 1, 2, 3, 4, 5, or 6); X is ONH, S or CH₂; and L is a ligand or a linker covalently linked to one or more ligands (e.g., L is aliphatic and aromatic alkyl, alkylester, alkylamine, dimethylamino alkyl, alkylether, alkylthioether, heteroaromatic alkyl, allyl, vinyl, alkyl groups functionalized with disulfide, oxime, ketone, acetal, hemiacetal, cleavable peptides, or cleavable sugars.

[0224] In some embodiments of any one of the aspects described herein, R⁵ is

[chemical structure]

### R³

[0225] In some embodiments of any one of the aspects described herein, R³ is a reactive phosphorus group, hydrogen, halogen, —OR²³², —SR²³³, optionally substituted C₁₋₃₀alkyl, C₁₋₃₀haloalkyl, optionally substituted C₂₋₃₀alkenyl, optionally substituted C₂₋₃₀alkynyl, or optionally substituted C₁₋₃₀alkoxy, amino (NH₂), alkylamino, dialkylamino, heterocyclyl, arylamino, diarylamino, heteroarylamino, diheteroarylamino, amino acid, —O(CH₂CH₂O)ᵣCH₂CH₂OR²³⁴, cyano, alkyl-thio-alkyl, thioalkoxy, cycloalkyl, aryl, heteroaryl, —NH(CH₂CH₂NH)ₛCH₂CH₂—R²³⁵, NHC(O)R²³⁶, a lipid, a linker covalently attached to a lipid, a ligand or a linker covalently attached to a ligand.

[0226] R²³² can be H, hydroxyl protecting group, optionally substituted C₁₋₃₀alkyl, C₁₋₃₀haloalkyl, optionally substituted C₂₋₃₀alkenyl, optionally substituted C₂₋₃₀alkynyl, or optionally substituted C₁₋₃₀alkoxy, cycloalkyl, heterocyclyl, aryl, heteroaryl. R²³³ can be H, sulfur protecting group, optionally substituted C₁₋₃₀alkyl, C₁₋₃₀haloalkyl, optionally substituted C₂₋₃₀alkenyl, optionally substituted C₂₋₃₀alkynyl, or optionally substituted C₁₋₃₀alkoxy, cycloalkyl, heterocyclyl, aryl, heteroaryl. R²³⁴ can be H, hydroxyl protecting group, optionally substituted C₁₋₃₀alkyl, C₁₋₃₀haloalkyl, optionally substituted C₂₋₃₀alkenyl, optionally substituted C₂₋₃₀alkynyl, or optionally substituted C₁₋₃₀alkoxy, cycloalkyl, heterocyclyl, aryl, heteroaryl. R²³⁵ can be hydrogen, halogen, hydroxyl, protected hydroxyl, optionally substituted C₁₋₃₀alkyl, C₁₋₃₀haloalkyl, optionally substituted C₂₋₃₀alkenyl, optionally substituted C₂₋₃₀alkynyl, or optionally substituted C₁₋₃₀alkoxy, amino (NH₂), alkylamino, dialkylamino, heterocyclyl, arylamino, diarylamino, heteroarylamino, diheteroarylamino, amino acid, cyano, alkyl-thio-alkyl, thioalkoxy, cycloalkyl, aryl, or heteroaryl. R²³⁶ can be hydrogen, halogen, hydroxyl, protected hydroxyl, optionally substituted C₁₋₃₀alkyl, C₁₋₃₀haloalkyl, optionally substituted C₂₋₃₀alkenyl, optionally substituted C₂₋₃₀alkynyl, or optionally substituted C₁₋₃₀alkoxy, amino (NH₂), alkylamino, dialkylamino, heterocyclyl, arylamino, diarylamino, heteroarylamino, diheteroarylamino, amino acid, cyano, alkyl-thio-alkyl, thioalkoxy, cycloalkyl, aryl, or heteroaryl.

[0227] In some embodiments of any one of the aspects described herein, R³ is a reactive phosphorus group.

[0228] Without wishing to be bound by a theory, reactive phosphorus groups are useful for forming internucleoside linkages including for example phosphodiester and phosphorothioate internucleoside linkages. Such reactive phosphorus groups are known in the art and contain phosphorus atoms in P^{III} or P^{V} valence state including, but not limited to, phosphoramidite, H-phosphonate, phosphate triesters and phosphorus containing chiral auxiliaries. Reactive phosphorous group in the form of phosphoramidites (P^{III} chemistry) as reactive phosphites are a preferred reactive phosphorous group for solid phase oligonucleotide synthesis. The intermediate phosphite compounds are subsequently oxidized to the Pv state using known methods to yield phosphodiester or phosphorothioate internucleoside linkages.

[0229] In some embodiments of any one of the aspects described herein, the reactive phosphorous group is —OP(OR^{P})(N(R^{P2})₂), —OP(SR^{P})(N(R^{P2})₂), —OP(O)(OR^{P})(N(R^{P2})₂), —OP(S)(OR^{P})(N(R^{P2})₂), —OP(O)(SR^{P})(N(R^{P2})₂), —OP(O)(OR^{P})H, —OP(S)(OR^{P})H, —OP(O)(SR^{P})H, —OP(O)(OR^{P})R^{P3}, —OP(S)(OR^{P})R^{P3}, or —OP(O)(SR^{P})R^{P3}. For example, the reactive phosphorous group is —OP(OR^{P})(N(R^{P2})₂).

[0230] In some embodiments of any one of the aspects, R^{P} is an optionally substituted C₁₋₆alkyl. For example, R^{P} is a C₁₋₆alkyl, optionally substituted with 1, 2, 3, 4 or 5 substituents independently selected from OH, CN, SC(O)Ph, oxo (═O), SH, SO₂NH₂, SO₂(C₁-C₄)alkyl, SO₂NH(C₁-C₄)alkyl, halogen, carbonyl, thiol, cyano, NH₂, NH(C₁-C₄)alkyl, N[(C₁-C₄)alkyl]₂, C(O)NH₂, COOH, COOMe, acetyl, (C₁-C₈)alkyl, O(C₁-C₈)alkyl (i.e., C₁-C₈alkoxy), O(C₁-C₈)haloalkyl, (C₂-C₈)alkenyl, (C₂-C₈)alkynyl, haloalkyl, thioalkyl, cyanomethylene, alkylaminyl, aryl, heteroaryl, substituted aryl, NH₂—C(O)-alkylene, NH(Me)-C(O)-alkylene, CH₂—C(O)— alkyl, C(O)— alkyl, alkylcarbonylaminyl, CH₂—[CH(OH)]ₘ—(CH₂)ₚ—OH, CH₂—[CH(OH)]ₘ—(CH₂)ₚ—NH₂ or CH₂-aryl-alkoxy, where “m” and “p” are independently 1, 2, 3, 4, 5 or 6. In some embodiments, R^{P} is a C₁₋₆alkyl, optionally substituted with a CN or —SC(O)Ph. For example, R^{P} is cyanoethyl (—CH₂CH₂CN).

[0231] In the reactive phosphorous groups, each R^{P2} is independently optionally substituted C₁₋₆alkyl. For example, each R^{P2} can be independently selected from methyl, ethyl, propyl, isopropyl, n-butyl, iso-butyl, pentyl or hexyl. It is noted that when two or more R^{P2} groups are present in the reactive phosphorous group, they can be same or different. Thus, in some none-limiting examples, when two or more R^{P2} groups are present, the R^{P2} groups are different. In some other non-limiting examples, when two or more R^{P2} groups are present, the R^{P2} groups are same. In some embodiments of any one of the aspects, each R^{P2} is isopropyl.

[0232] In some embodiments of any one of the aspects, both R^{P2} taken together with the nitrogen atom to which they are attached form an optionally substituted 3-8 membered heterocyclyl. Exemplary heterocyclyls include, but are not limited to, pyrrolidinyl, piperazinyl, dioxanyl, morpholinyl, tetrahydrofuranyl, piperidyl, 4-morpholyl, 4-piperazinyl, pyrrolidinyl, perhydropyrrolizinyl, 1,4-diazaperhydroepinyl, 1,3-dioxanyl, 1,4-dioxanyland the like, each of which can be optionally substituted with 1, 2 or 3 substituents independently selected from OH, CN, SC(O)Ph, oxo (═O), SH, SO₂NH₂, SO₂(C₁-C₄)alkyl, SO₂NH(C₁-C₄)alkyl, halogen, carbonyl, thiol, cyano, NH₂, NH(C₁-C₄)alkyl, N[(C₁-C₄)alkyl]₂, C(O)NH₂, COOH, COOMe, acetyl, (C₁-C₈)alkyl, O(C₁-C₈)alkyl (i.e., C₁-C₈alkoxy), O(C₁-C₈)haloalkyl, (C₂-C₈)alkenyl, (C₂-C₈)alkynyl, haloalkyl, thioalkyl, cyanomethylene, alkylaminyl, aryl, heteroaryl, substituted aryl, NH₂—C(O)— alkylene, NH(Me)—C(O)-alkylene, CH₂—C(O)— alkyl, C(O)— alkyl, alkylcarbonylaminyl, CH₂—[CH(OH)]ₘ—(CH₂)ₚ—OH, CH₂—[CH(OH)]ₘ—(CH₂)ₚ—NH₂ or CH₂-aryl-alkoxy, where “m” and “p” are independently 1, 2, 3, 4, 5 or 6.

[0233] In some embodiments of any one of the aspects, R^{P} and one of R^{P2} taken together with the atoms to which they are attached form an optionally substituted 4-8 membered heterocyclyl. Exemplary heterocyclyls include, but are not limited to, pyrrolidinyl, piperazinyl, dioxanyl, morpholinyl, tetrahydrofuranyl, piperidyl, 4-morpholyl, 4-piperazinyl, pyrrolidinyl, perhydropyrrolizinyl, 1,4-diazaperhydroepinyl, 1,3-dioxanyl, 1,4-dioxanyland the like, each of which can be optionally substituted with 1, 2 or 3 substituents independently selected from OH, CN, SC(O)Ph, oxo (═O), SH, SO₂NH₂, SO₂(C₁-C₄)alkyl, SO₂NH(C₁-C₄)alkyl, halogen, carbonyl, thiol, cyano, NH₂, NH(C₁-C₄)alkyl, N[(C₁-C₄)alkyl]₂, C(O)NH₂, COOH, COOMe, acetyl, (C₁-C₈)alkyl, O(C₁-C₈)alkyl (i.e., C₁-C₈alkoxy), O(C₁-C₈)haloalkyl, (C₂-C₈)alkenyl, (C₂-C₈)alkynyl, haloalkyl, thioalkyl, cyanomethylene, alkylaminyl, aryl, heteroaryl, substituted aryl, NH₂—C(O)— alkylene, NH(Me)—C(O)-alkylene, CH₂—C(O)— alkyl, C(O)— alkyl, alkylcarbonylaminyl, CH₂—[CH(OH)]ₘ—(CH₂)ₚ—OH, CH₂—[CH(OH)]ₘ—(CH₂)ₚ—NH₂ or CH₂-aryl-alkoxy, where “m” and “p” are independently 1, 2, 3, 4, 5 or 6.

[0234] In the reactive phosphorous groups, each R^{P3} is independently optionally substituted C₁₋₆alkyl. For example, R^{P3} can be a C₁₋₆alkyl, optionally substituted with 1, 2, 3, 4 or 5 substituents independently selected from OH, CN, SC(O)Ph, oxo (═O), SH, SO₂NH₂, SO₂(C₁-C₄)alkyl, SO₂NH(C₁-C₄)alkyl, halogen, carbonyl, thiol, cyano, NH₂, NH(C₁-C₄)alkyl, N[(C₁-C₄)alkyl]₂, C(O)NH₂, COOH, COOMe, acetyl, (C₁-C₈)alkyl, O(C₁-C₅)alkyl (i.e., C₁-C₈alkoxy), O(C₁-C₅)haloalkyl, (C₂-C₈)alkenyl, (C₂-C₅)alkynyl, haloalkyl, thioalkyl, cyanomethylene, alkylaminyl, aryl, heteroaryl, substituted aryl, NH₂—C(O)-alkylene, NH(Me)-C(O)-alkylene, CH₂C(O)— alkyl, C(O)— alkyl, alkylcarbonylaminyl, CH₂—[CH(OH)]ₘ—(CH₂)ₚ—OH, CH₂—[CH(OH)]ₘ—(CH₂)ₚ—NH₂ or CH₂-aryl-alkoxy, where “m” and “p” are independently 1, 2, 3, 4, 5 or 6. For example, R^{P3} is methyl, ethyl, propyl, isopropyl, n-butyl, iso-butyl, pentyl or hexyl, each of which can be optionally substituted with a NH₂, OH, C(O)NH₂, COOH, halo, SH, or C₁-C₆alkoxy.

[0235] In some embodiments of any one of the aspects, the reactive phosphorous group is —OP(OR^{P})(N(R^{P2})₂). For example, the reactive phosphorous group is —OP(OR^{P})(N(R^{P2})₂), where R^{P} is cyanoethyl (—CH₂CH₂CN) and each R^{P2} is isopropyl.

[0236] In some embodiments of any one of the aspects described herein, R³ is —OP(OR^{P})(N(R^{P2})₂), —OP(SR^{P})(N(R^{P2})₂), —OP(O)(OR^{P})(N(R^{P2})₂), —OP(S)(OR^{P})(N(R^{P2})₂), —OP(O)(SR^{P})(N(R^{P2})₂), —OP(O)(OR^{P})H, —OP(S)(OR^{P})H, —OP(O)(SR^{P})H, —OP(O)(OR^{P})R^{P3}, —OP(S)(OR^{P})R^{P3}, or —OP(O)(SR^{P})R^{P3}, where each R^{P} is cyanoethyl (—CH₂CH₂CN), each R^{P2} is independently optionally substituted C₁₋₆alkyl; and each R^{P3} is independently optionally substituted C₁₋₆alkyl.

[0237] In some embodiments of any one of the aspects, R³ is —OP(OR^{P})(N(R^{P2})₂), —OP(SR^{P})(N(R^{P2})₂), —OP(O)(OR^{P})(N(R^{P2})₂), —OP(S)(OR^{P})(N(R^{P2})₂), —OP(O)(SR^{P})(N(R^{P2})₂), —OP(O)(OR^{P})H, —OP(S)(OR^{P}) an optionally substituted C₁₋₆alkyl, where each R^{P} is cyanoethyl (—CH₂CH₂CN), each R^{P2} is independently optionally substituted C₁₋₆alkyl; and each R^{P3} is independently optionally substituted C₁₋₆alkyl.

[0238] In some embodiments of any one of the aspects, R³ is —OP(OR^{P})(N(R^{P2})₂). For example, the R³ is —OP(OR^{P})(N(R^{P2})₂), where R^{P} is cyanoethyl (—CH₂CH₂CN) and each R^{P2} is isopropyl.

[0239] In some embodiments of any one of the aspects, when R³ is —OR²³², R²³² can be hydrogen or a hydroxyl protecting group. For example, R²³² can be hydrogen in some embodiments of any one of the aspects described herein. In some embodiments, R²³ is —OC(O)CH₂CH₂CO₂H.

[0240] When R³ is —SR²³³, R²³³ can be hydrogen or a sulfur protecting group. Accordingly, in some embodiments of any one of the aspects, R²³³ is hydrogen.

[0241] When R³ is —O(CH₂CH₂O)ᵣCH₂CH₂OR²³⁴, r can be 1-50; R²³⁴ is independently for each occurrence H, C₁-C₃₀alkyl, cyclyl, heterocyclyl, aryl, heteroaryl, aralkyl, sugar or R²³⁵; and R²³⁵ is independently for each occurrence amino (NH₂), alkylamino, dialkylamino, arylamino, diarylamino, heteroarylamino, or diheteroaryl amino.

[0242] When R³ is —NH(CH₂CH₂NH)ₛCH₂CH₂—R²³⁵, s can be 1-50 and R²³⁵ can be independently for each occurrence amino (NH₂), alkylamino, dialkylamino, arylamino, diarylamino, heteroarylamino, or diheteroaryl amino.

[0243] In some embodiments of any one of the aspects described herein, R³ is hydrogen, halogen, —OR²³², or optionally substituted C₁-C₃₀alkoxy. For example, R³ is halogen, —OR²³², or optionally substituted C₁-C₃₀alkoxy. In some embodiments of any one of the aspects described herein, R³ is F, OH or optionally substituted C₁-C₃₀alkoxy.

[0244] In some embodiments of any one of the aspects described herein, R³ is C₁-C₃₀alkoxy optionally substituted with 1, 2, 3, 4 or 5 substituents independently selected from OH, CN, SC(O)Ph, oxo (═O), SH, SO₂NH₂, SO₂(C₁-C₄)alkyl, SO₂NH(C₁-C₄)alkyl, halogen, carbonyl, thiol, cyano, NH₂, NH(C₁-C₄)alkyl, N[(C₁-C₄)alkyl]₂, C(O)NH₂, COOH, COOMe, acetyl, (C₁-C₈)alkyl, O(C₁-C₈)alkyl (i.e., C₁-C₈alkoxy), O(C₁-C₈)haloalkyl, (C₂-C₈)alkenyl, (C₂-C₈)alkynyl, haloalkyl, thioalkyl, cyanomethylene, alkylaminyl, aryl, heteroaryl, substituted aryl, NH₂—C(O)-alkylene, NH(Me)—C(O)-alkylene, CH₂—C(O)— alkyl, C(O)— alkyl, alkylcarbonylaminyl, CH₂—[CH(OH)]ₘ—(CH₂)ₚ—OH, CH₂—[CH(OH)]ₘ—(CH₂)ₚ—NH₂ or CH₂-aryl-alkoxy, where “m” and “p” are independently 1, 2, 3, 4, 5 or 6. For example, R²³ is C₁-C₃₀alkoxy optionally substituted with a NH₂, OH, C(O)NH₂, COOH, halo, SH, or C₁-C₆alkoxy. In some embodiments of any one of the aspects described herein, R²³ is —O(CH₂)ₜCH₃, where t is 1-21. For example, tis 14, 15, 16, 17 or 18. In one non-limiting example, t is 16.

[0245] In some embodiments of any one of the aspects, R³ is —O(CH₂)ᵤR²³⁷, where u is 2-10; R²³⁷ is C₁-C₆alkoxy, amino (NH₂), CO₂H, OH or halo. For example, R²³⁷ is —CH₃ or NH₂. Accordingly, in some embodiments of any one of the aspects described herein, R³ is —O(CH₂)ᵤ—OMe or R²³ is —O(CH₂)ᵤNH₂.

[0246] In some embodiments of any one of the aspects described herein, u is 2, 3, 4, 5 or 6. For example, u is 2, 3 or 6. In one non-limiting example, u is 2. In another non-limiting example, u is 3 or 6.

[0247] In some embodiments of any one of the aspects described herein, R³ is a C₁-C₆haloalkyl. For example, R³ is a C₁-C₄haloalkyl. In some embodiments of any one of the aspects described herein, R²³ is —CF₃, —CF₂CF₃, —CF₂CF₂CF₃ or —CF₂(CF₃)₂.

[0248] In some embodiments of any one of the aspects described herein, R³ is —OCH(CH₂OR²³⁸)CH₂OR²³⁹, where R²³⁸ and R²³⁹ independently are H, optionally substituted C₁-C₃₀alkyl, optionally substituted C₂-C₃₀alkenyl or optionally substituted C₂-C₃₀alkynyl. For example, R²³⁸ and R²³⁹ independently are optionally substituted C₁-C₃₀alkyl.

[0249] In some embodiments of any one of the aspects described herein, R²³ is —CH₂C(O)NHR²³¹⁰, where R²³¹⁰ is H, optionally substituted C₁-C₃₀alkyl, optionally substituted C₂-C₃₀alkenyl or optionally substituted C₂-C₃₀alkynyl. For example, R²³¹⁰ is H or optionally substituted C₁-C₃₀alkyl. In some embodiments, R²³¹⁰ is optionally substituted C₁-C₆alkyl

### R²

[0250] In some embodiments of any one of the aspects described herein, R² is hydrogen, halogen, —OR²²², —SR²²³, optionally substituted C₁₋₃₀alkyl, C₁₋₃₀haloalkyl, optionally substituted C₂₋₃₀alkenyl, optionally substituted C₂₋₃₀alkynyl, or optionally substituted C₁₋₃₀alkoxy, amino (NH₂), alkylamino, dialkylamino, heterocyclyl, arylamino, diarylamino, heteroarylamino, diheteroarylamino, amino acid, —O(CH₂CH₂O)ᵣCH₂CH₂OR²²⁴, cyano, alkyl-thio-alkyl, thioalkoxy, cycloalkyl, aryl, heteroaryl, —NH(CH₂CH₂NH)ₛCH₂CH₂—R²²⁵, NHC(O)R²²⁶, a lipid, a linker covalently attached to a lipid, a ligand, a linker covalently attached to a ligand, or a reactive phosphorus group.

[0251] R²²² can be H, hydroxyl protecting group, optionally substituted C₁₋₃₀alkyl, C₁₋₃₀haloalkyl, optionally substituted C₂₋₃₀alkenyl, optionally substituted C₂₋₃₀alkynyl, or optionally substituted C₁₋₃₀alkoxy, cycloalkyl, heterocyclyl, aryl, heteroaryl. R²²³ can be H, sulfur protecting group, optionally substituted C₁₋₃₀alkyl, C₁₋₃₀haloalkyl, optionally substituted C₂₋₃₀alkenyl, optionally substituted C₂₋₃₀alkynyl, or optionally substituted C₁₋₃₀alkoxy, cycloalkyl, heterocyclyl, aryl, heteroaryl. R²²⁴ can be H, hydroxyl protecting group, optionally substituted C₁₋₃₀alkyl, C₁₋₃₀haloalkyl, optionally substituted C₂₋₃₀alkenyl, optionally substituted C₂₋₃₀alkynyl, or optionally substituted C₁₋₃₀alkoxy, cycloalkyl, heterocyclyl, aryl, heteroaryl. R²²⁵ can be hydrogen, halogen, hydroxyl, protected hydroxyl, optionally substituted C₁₋₃₀alkyl, C₁₋₃₀haloalkyl, optionally substituted C₂₋₃₀alkenyl, optionally substituted C₂₋₃₀alkynyl, or optionally substituted C₁₋₃₀alkoxy, amino (NH₂), alkylamino, dialkylamino, heterocyclyl, arylamino, diarylamino, heteroarylamino, diheteroarylamino, amino acid, cyano, alkyl-thio-alkyl, thioalkoxy, cycloalkyl, aryl, or heteroaryl. R²²⁶ can be hydrogen, halogen, hydroxyl, protected hydroxyl, optionally substituted C₁₋₃₀alkyl, C₁₋₃₀haloalkyl, optionally substituted C₂₋₃₀alkenyl, optionally substituted C₂₋₃₀alkynyl, or optionally substituted C₁₋₃₀alkoxy, amino (NH₂), alkylamino, dialkylamino, heterocyclyl, arylamino, diarylamino, heteroarylamino, diheteroarylamino, amino acid, cyano, alkyl-thio-alkyl, thioalkoxy, cycloalkyl, aryl, or heteroaryl.

[0252] In some embodiments of any one of the aspects described herein, R² is hydrogen, halogen, —OR²²², —SR²²³, optionally substituted C₁₋₃₀alkyl, C₁₋₃₀haloalkyl, optionally substituted C₂₋₃₀alkenyl, optionally substituted C₂₋₃₀alkynyl, or optionally substituted C₁₋₃₀alkoxy, amino (NH₂), alkylamino, dialkylamino, heterocyclyl, arylamino, diarylamino, heteroarylamino, diheteroarylamino, amino acid, —O(CH₂CH₂O)ᵣCH₂CH₂OR²²⁴, cyano, alkyl-thio-alkyl, thioalkoxy, cycloalkyl, aryl, heteroaryl, —NH(CH₂CH₂NH)ₛCH₂CH₂—R²²⁵, NHC(O)R²²⁴.

[0253] In some embodiments of any one of the aspects described herein, R² is hydrogen, hydroxyl, protected hydroxyl, halogen, optionally substituted C₁₋₃₀ alkyl, optionally substituted C₂₋₃₀alkenyl, optionally substituted C₂₋₃₀alkynyl, optionally substituted C₁₋₃₀ alkoxy, alkoxyalkyl (e.g., methoxyethyl), alkoxyalkylamine, alkoxyoxycarboxylate, amino, alkylamino, dialkylamino, —O—C₄₋₃₀alkyl-ON(CH₂R⁸)(CH₂R⁹), or —O—C₄₋₃₀alkyl-ON(CH₂R⁸)(CH₂R⁹). For example, R² is hydrogen, hydroxyl, protected hydroxyl, halogen, optionally substituted C₁₋₃₀ alkoxy, alkoxyalkyl (e.g., methoxyethyl), alkoxyalkylamine, alkoxyoxycarboxylate, amino, alkylamino, or dialkylamino.

[0254] In some embodiments of any one of the aspects, R² is hydrogen, hydroxyl, protected hydroxyl, halogen, optionally substituted C₁₋₃₀ alkoxy, or alkoxyalkyl (e.g., methoxyethyl. In some embodiments of any one of the aspects, R² is hydrogen, hydroxyl, protected hydroxyl, fluoro or methoxy.

[0255] In some embodiments of any one of the aspects R² is halogen. For example, R² can be fluoro, chloro, bromo or iodo. In some embodiments of any one of the aspects described herein, R² is fluoro.

[0256] In some embodiments of any one of the aspects described herein, R² is hydrogen, fluoro or methoxy.

[0257] In some embodiments of any one of the aspects, when R² is OR²²², R²²² can be hydrogen or a hydroxyl protecting group.

[0258] When R² is —SR²²³, R²²³ can be hydrogen or a sulfur protecting group. Accordingly, in some embodiments of any one of the aspects, R²²³ is hydrogen.

[0259] When R² is —O(CH₂CH₂O)ᵣCH₂CH₂OR²²⁴, r can be 1-50; R²²⁴ is independently for each occurrence H, C₁-C₃₀alkyl, cyclyl, heterocyclyl, aryl, heteroaryl, aralkyl, sugar or R²²⁵; and R²²⁵ is independently for each occurrence amino (NH₂), alkylamino, dialkylamino, arylamino, diarylamino, heteroarylamino, or diheteroaryl amino.

[0260] When R² is —NH(CH₂CH₂NH)ₛCH₂CH₂—R²²⁵, s can be 1-50 and R²²⁵ can be independently for each occurrence amino (NH₂), alkylamino, dialkylamino, arylamino, diarylamino, heteroarylamino, or diheteroaryl amino.

[0261] In some embodiments of any one of the aspects described herein, R² is hydrogen, halogen, —OR²²², or optionally substituted C₁-C₃₀alkoxy. For example, R² is halogen, —OR²²², or optionally substituted C₁-C₃₀alkoxy. In some embodiments of any one of the aspects described herein, R² is F, OH or optionally substituted C₁-C₃₀alkoxy.

[0262] In some embodiments of any one of the aspects described herein, R² is C₁-C₃₀alkoxy optionally substituted with 1, 2, 3, 4 or 5 substituents independently selected from OH, CN, SC(O)Ph, oxo (═O), SH, SO₂NH₂, SO₂(C₁-C₄)alkyl, SO₂NH(C₁-C₄)alkyl, halogen, carbonyl, thiol, cyano, NH₂, NH(C₁-C₄)alkyl, N[(C₁-C₄)alkyl]₂, C(O)NH₂, COOH, COOMe, acetyl, (C₁-C₈)alkyl, O(C₁-C₅)alkyl (i.e., C₁-C₈alkoxy), O(C₁-C₅)haloalkyl, (C₂-C₈)alkenyl, (C₂-C₈)alkynyl, haloalkyl, thioalkyl, cyanomethylene, alkylaminyl, aryl, heteroaryl, substituted aryl, NH₂—C(O)-alkylene, NH(Me)—C(O)-alkylene, CH₂—C(O)— alkyl, C(O)— alkyl, alkylcarbonylaminyl, CH₂—[CH(OH)]ₘ—(CH₂)ₚ—OH, CH₂—[CH(OH)]ₘ—(CH₂)ₚ—NH₂ or CH₂-aryl-alkoxy, where “m” and “p” are independently 1, 2, 3, 4, 5 or 6. For example, R²² is C₁-C₃₀alkoxy optionally substituted with a NH₂, OH, C(O)NH₂, COOH, halo, SH, or C₁-C₆alkoxy. In some embodiments of any one of the aspects described herein, R² is —O(CH₂)ₜCH₃, where t is 1-21. For example, t is 14, 15, 16, 17 or 18. In one non-limiting example, t is 16.

[0263] In some embodiments of any one of the aspects, R² is —O(CH₂)ᵤR²²⁷, where u is 2-10; R²²⁷ is C₁-C₆alkoxy, amino (NH₂), CO₂H, OH or halo. For example, R²²⁷ is —CH₃ or NH₂. Accordingly, in some embodiments of any one of the aspects described herein, R² is —O(CH₂)ᵤ—OMe or R² is —O(CH₂)ᵤNH₂. In some embodiments of any one of the aspects described herein, u is 2, 3, 4, 5 or 6. For example, u is 2, 3 or 6. In one non-limiting example, u is 2. In another non-limiting example, u is 3 or 6.

[0264] In some embodiments of any one of the aspects described herein, R² is a C₁-C₆haloalkyl. For example, R² is a C₁-C₄haloalkyl. In some embodiments of any one of the aspects described herein, R² is —CF₃, —CF₂CF₃, —CF₂CF₂CF₃ or —CF₂(CF₃)₂.

[0265] In some embodiments of any one of the aspects described herein, R² is —OCH(CH₂OR²²⁸)CH₂OR²²⁹, where R²²⁸ and R²²⁹ independently are H, optionally substituted C₁-C₃₀alkyl, optionally substituted C₂-C₃₀alkenyl or optionally substituted C₂-C₃₀alkynyl. For example, R²²⁸ and R²²⁹ independently are optionally substituted C₁-C₃₀alkyl.

[0266] In some embodiments of any one of the aspects described herein, R² is —CH₂C(O)NHR²²¹⁰, where R²²¹⁰ is H, optionally substituted C₁-C₃₀alkyl, optionally substituted C₂-C₃₀alkenyl or optionally substituted C₂-C₃₀alkynyl. For example, R²²¹⁰ is H or optionally substituted C₁-C₃₀alkyl. In some embodiments, R²²¹⁰ is optionally substituted C₁-C₆alkyl.

[0267] In some embodiments of any one of the aspects, when R² is —OR²²², R²²² can be hydrogen or a hydroxyl protecting group.

[0268] When R² is —SR²²³, R²²³ can be hydrogen or a sulfur protecting group. Accordingly, in some embodiments of any one of the aspects, R²²³ is hydrogen.

[0269] When R² is —O(CH₂CH₂O)ᵣCH₂CH₂OR²²⁴, r can be 1-50; R²²⁴ is independently for each occurrence H, C₁-C₃₀alkyl, cyclyl, heterocyclyl, aryl, heteroaryl, aralkyl, sugar or R²²⁵; and R²²⁵ is independently for each occurrence amino (NH₂), alkylamino, dialkylamino, arylamino, diarylamino, heteroarylamino, or diheteroaryl amino.

[0270] When R² is —NH(CH₂CH₂NH)ₛCH₂CH₂—R²²⁵, s can be 1-50 and R²²⁵ can be independently for each occurrence amino (NH₂), alkylamino, dialkylamino, arylamino, diarylamino, heteroarylamino, or diheteroaryl amino.

[0271] In some embodiments of any one of the aspects described herein, R² is hydrogen, halogen, —OR²²², or optionally substituted C₁-C₃₀alkoxy. For example, R² is halogen, —OR²²², or optionally substituted C₁-C₃₀alkoxy. In some embodiments of any one of the aspects described herein, R² is F, OH or optionally substituted C₁-C₃₀alkoxy.

[0272] In some embodiments of any one of the aspects described herein, R² is C₁-C₃₀alkoxy optionally substituted with 1, 2, 3, 4 or 5 substituents independently selected from OH, CN, SC(O)Ph, oxo (═O), SH, SO₂NH₂, SO₂(C₁-C₄)alkyl, SO₂NH(C₁-C₄)alkyl, halogen, carbonyl, thiol, cyano, NH₂, NH(C₁-C₄)alkyl, N[(C₁-C₄)alkyl]₂, C(O)NH₂, COOH, COOMe, acetyl, (C₁-C₈)alkyl, O(C₁-C₅)alkyl (i.e., C₁-C₈alkoxy), O(C₁-C₈)haloalkyl, (C₂-C₈)alkenyl, (C₂-C₈)alkynyl, haloalkyl, thioalkyl, cyanomethylene, alkylaminyl, aryl, heteroaryl, substituted aryl, NH₂—C(O)-alkylene, NH(Me)-C(O)-alkylene, CH₂—C(O)-alkyl, C(O)-alkyl, alkylcarbonylaminyl, CH₂—[CH(OH)]ₘ—(CH₂)ₚ—OH, CH₂—[CH(OH)]ₘ—(CH₂)ₚ—NH₂ or CH₂-aryl-alkoxy, where “m” and “p” are independently 1, 2, 3, 4, 5 or 6. For example, R²² is C₁-C₃₀alkoxy optionally substituted with a NH₂, OH, C(O)NH₂, COOH, halo, SH, or C₁-C₆alkoxy. In some embodiments of any one of the aspects described herein, R² is —O(CH₂)ₜCH₃, where t is 1-21. For example, t is 14, 15, 16, 17 or 18. In one non-limiting example, t is 16.

[0273] In some embodiments of any one of the aspects, R² is —O(CH₂)ᵤR²²⁷, where u is 2-10; R²²⁷ is C₁-C₆alkoxy, amino (NH₂), CO₂H, OH or halo. For example, R²²⁷ is —CH₃ or NH₂. Accordingly, in some embodiments of any one of the aspects described herein, R² is —O(CH₂)ᵤ—OMe or R² is —O(CH₂)ᵤNH₂. In some embodiments of any one of the aspects described herein, u is 2, 3, 4, 5 or 6. For example, u is 2, 3 or 6. In one non-limiting example, u is 2. In another non-limiting example, u is 3 or 6.

[0274] In some embodiments of any one of the aspects described herein, R² is a C₁-C₆haloalkyl. For example, R² is a C₁-C₄haloalkyl. In some embodiments of any one of the aspects described herein, R² is-CF₃, —CF₂CF₃, —CF₂CF₂CF₃ or —CF₂ (CF₃)₂.

[0275] In some embodiments of any one of the aspects described herein, R² is —OCH(CH₂OR²²⁸)CH₂OR²²⁹, where R²²⁸ and R²²⁹ independently are H, optionally substituted C₁-C₃₀alkyl, optionally substituted C₂-C₃₀alkenyl or optionally substituted C₂-C₈alkynyl. For example, R²²⁸ and R²²⁹ independently are optionally substituted C₁-C₃₀alkyl.

[0276] In some embodiments of any one of the aspects described herein, R² is —CH₂C(O)NHR²²¹⁰, where R²²¹⁰ is H, optionally substituted C₁-C₃₀alkyl, optionally substituted C₂-C₃₀alkenyl or optionally substituted C₂-C₃₀alkynyl. For example, R²²¹⁰ is H or optionally substituted C₁-C₃₀alkyl. In some embodiments, R²²¹⁰ is optionally substituted C₁-C₆alkyl.

[0277] In some embodiments of any one of the aspects described herein, R² is a reactive phosphorus group. For example, R² is —OP(OR^{P})(N(R^{P2})₂), —OP(SR^{P})(N(R^{P2})₂), —OP(O)(OR^{P})(N(R^{P2})₂), —OP(S)(OR^{P})(N(R^{P2})₂), —OP(O)(SR^{P})(NR^{P2})₂, —OP(O)(OR^{P})H, —OP(S)(OR^{P})H, —OP(O)(SR^{P})H, —OP(O)(OR^{P})R^{P3}, —OP(S)(OR^{P})R^{P3}, or —OP(O)(SR^{P})R^{P3}, where each R^{P} is cyanoethyl (—CH₂CH₂CN), each R^{P2} is independently optionally substituted C₁₋₆alkyl; and each R^{P3} is independently optionally substituted C₁₋₆alkyl.

[0278] In some embodiments of any one of the aspects, R² is —OP(OR^{P})(N(R^{P2})₂), —OP(SR^{P})(N(R^{P2})₂), —OP(O)(OR^{P})(N(R^{P2})₂), —OP(S)(OR^{P})(N(R^{P2})₂), —OP(O)(SR^{P})(N(R^{P2})₂), —OP(O)(OR^{P})H, —OP(S)(OR^{P}) an optionally substituted C₁₋₆alkyl, where each R^{P} is cyanoethyl (—CH₂CH₂CN), each R^{P2} is independently optionally substituted C₁₋₆alkyl; and each R^{P3} is independently optionally substituted C₁₋₆alkyl.

[0279] In some embodiments of any one of the aspects, R² is —OP(OR^{P})(N(R^{P2})₂). For example, the R² is —OP(OR^{P})(N(R^{P2})₂), where R^{P} is cyanoethyl (—CH₂CH₂CN) and each R^{P2} is isopropyl.

[0280] It is noted that only one of R² and R³ can be a reactive phosphorus group. Preferably, R³ is a phosphorous group.

[0281] In some embodiments of any one of the aspects described herein, R² and R⁴ taken together are 4′-C(R¹⁰R¹¹)ᵥ—Y-2′ or 4′-Y—C(R¹⁰R¹¹)ᵥ-2′; v is 1, 2 or 3; where Y is —O—, —CH₂—, —CH(Me)-, —C(CH₃)₂—, —S—, —N(R¹²)—, —C(O)—, —C(S)—, —S(O)—, —S(O)₂—, —OC(O)—, —C(O)O—, —N(R¹²)C(O)—, or —C(O)N(R¹²)—; R¹⁰ and R¹¹ independently are H, optionally substituted C₁-C₆alkyl, optionally substituted C₂-C₆alkenyl or optionally substituted C₂-C₆alkynyl; R¹² is hydrogen, optionally substituted C₁₋₃₀alkyl, optionally substituted C₁-C₃₀alkoxy, C₁₋₄haloalkyl, optionally substituted C₂₋₄alkenyl, optionally substituted C₂₋₄alkynyl, optionally substituted C₁₋₃₀alky-CO₂H, or a nitrogen-protecting group.

[0282] In some embodiments of any one of the aspects, v is 1. In some other embodiments of any one of the aspects, v is 2.

[0283] In some embodiments, Y is O. For example, R² and R⁴ taken together are 4′-C(R¹⁰R¹¹)ᵥ—O-2′.

[0284] It is noted that R¹⁰ and R¹¹ attached to the same carbon can be same or different. For example, one of R¹⁰ and R¹¹ can be H and the other of the R¹⁰ and R¹¹ can be an optionally substituted C₁-C₆alkyl. In one non-limiting example, one of R¹⁰ and R¹¹ can be H and the other can be C₁-C₆alkyl, optionally substituted with 1, 2, 3, 4 or 5 substituents independently selected from OH, CN, SC(O)Ph, oxo (═O), SH, SO₂NH₂, SO₂(C₁-C₄)alkyl, SO₂NH(C₁-C₄)alkyl, halogen, carbonyl, thiol, cyano, NH₂, NH(C₁-C₄)alkyl, N[(C₁-C₄)alkyl]₂, C(O)NH₂, COOH, COOMe, acetyl, (C₁-C₅)alkyl, O(C₁-C₅)alkyl (i.e., C₁-C₈alkoxy), O(C₁-C₅)haloalkyl, (C₂-C₈)alkenyl, (C₂-C₈)alkynyl, haloalkyl, thioalkyl, cyanomethylene, alkylaminyl, aryl, heteroaryl, substituted aryl, NH₂—C(O)-alkylene, NH(Me)-C(O)-alkylene, CH₂—C(O)-alkyl, C(O)-alkyl, alkylcarbonylaminyl, CH₂—[CH(OH)]ₘ—(CH₂)ₚ—OH, CH₂—[CH(OH)]ₘ—(CH₂)ₚ—NH₂ or CH₂-aryl-alkoxy, where “m” and “p” are independently 1, 2, 3, 4, 5 or 6. For example, R¹⁰ and R¹¹ independently are H or C₁-C₃₀alkyl optionally substituted with a NH₂, OH, C(O)NH₂, COOH, halo, SH, or C₁-C₆alkoxy. In some embodiments of any one of the aspects, one of R¹⁰ and R¹¹ is H and the other is C₁-C₆alkyl, optionally substituted with a C₁-C₆alkoxy. For example, one of R¹⁰ and R¹¹ is H and the other is —CH₃ or CH₂OCH₃.

[0285] In some embodiments of any one of the aspects, R¹⁰ and R¹¹ attached to the same C are the same. For example, R¹⁰ and R¹¹ attached to the same C are H.

[0286] In some embodiments of any one of the aspects, R² and R⁴ taken together are 4′-CH₂—O-2′, 4′—CH(CH₃)—O-2′, 4′—CH(CH₂OCH₃)—O-2′, or 4′-CH₂CH₂—O-2′. For example, R² and R⁴ taken together are 4′-CH₂CH₂—O-2′.

[0287] In some embodiments of any one of the aspects described herein, R² and R⁴ taken together are 4′-C(R¹⁰R¹¹)ᵥ—Y-2′ or 4′-Y—C(R¹⁰R¹¹)ᵥ-2′; and R³ is a reactive phosphorous group, hydroxyl or protected hydroxyl.

[0288] In some embodiments of any one of the aspects described herein, R² is hydrogen, fluoro or methoxy; R³ is a reactive phosphorous group, hydroxyl or protected hydroxyl; and R⁴ is H.

### R⁴

[0289] In some embodiments of any one of the aspects described herein, R⁴ can be hydrogen, optionally substituted C₁₋₆alkyl, optionally substituted C₂₋₆alkenyl, optionally substituted C₂₋₆alkynyl, or optionally substituted C₁₋₆alkoxy. For example, R⁴ can be hydrogen, optionally substituted C₁₋₆alkyl or optionally substituted C₁₋₆alkoxy.

[0290] In some embodiments of any one of the aspects described herein, R⁴ is H.

### R²³

[0291] In some embodiments of any one of the aspects described herein, R²³ is a bond to an internucleotide linkage to a subsequent nucleoside, hydroxyl, protected hydroxyl, optionally substituted C₁₋₃₀ alkoxy, halogen, alkoxyalkyl (e.g., methoxyethyl), amino, alkylamino, dialkylamino, a 3′-oligonuclotide capping group (e.g., an inverted nucleotide or an inverted abasic nucleotide), a ligand, or a linker covalently bonded to one or more ligands (e.g., N-acetylgalactosamine (GalNac)).

[0292] In some embodiments of any one of the aspects described herein, R²³ is a bond to an internucleotide linkage to a subsequent nucleotide. It is noted that only one of R²³ and R₂₂ can be a bond to an internucleotide linkage to a subsequent nucleotide. Preferably, R²³ is a bond to an internucleotide linkage to a subsequent nucleotide.

[0293] In some embodiments of any one of the aspects described herein, R²³ is a hydrogen, halogen, —OR²³², —SR²³³, optionally substituted C₁₋₃₀alkyl, C₁₋₃₀haloalkyl, optionally substituted C₂₋₃₀alkenyl, optionally substituted C₂₋₃₀alkynyl, or optionally substituted C₁₋₃₀alkoxy, amino (NH₂), alkylamino, dialkylamino, heterocyclyl, arylamino, diarylamino, heteroarylamino, diheteroarylamino, amino acid, —O(CH₂CH₂O)ᵣCH₂CH₂OR²³⁴, cyano, alkyl-thio-alkyl, thioalkoxy, cycloalkyl, aryl, heteroaryl, —NH(CH₂CH₂NH)ₛCH₂CH₂—R²³⁵, NHC(O)R²³⁶, a lipid, a linker covalently attached to a lipid, a ligand or a linker covalently attached to a ligand.

[0294] R²³² can be H, hydroxyl protecting group, optionally substituted C₁₋₃₀alkyl, C₁₋₃₀haloalkyl, optionally substituted C₂₋₃₀alkenyl, optionally substituted C₂₋₃₀alkynyl, or optionally substituted C₁₋₃₀alkoxy, cycloalkyl, heterocyclyl, aryl, heteroaryl. R²³³ can be H, sulfur protecting group, optionally substituted C₁₋₃₀alkyl, C₁₋₃₀haloalkyl, optionally substituted C₂₋₃₀alkenyl, optionally substituted C₂₋₃₀alkynyl, or optionally substituted C₁₋₃₀alkoxy, cycloalkyl, heterocyclyl, aryl, heteroaryl. R²³⁴ can be H, hydroxyl protecting group, optionally substituted C₁₋₃₀alkyl, C₁₋₃₀haloalkyl, optionally substituted C₂₋₃₀alkenyl, optionally substituted C₂₋₃₀alkynyl, or optionally substituted C₁₋₃₀alkoxy, cycloalkyl, heterocyclyl, aryl, heteroaryl. R²³⁵ can be hydrogen, halogen, hydroxyl, protected hydroxyl, optionally substituted C₁₋₃₀alkyl, C₁₋₃₀haloalkyl, optionally substituted C₂₋₃₀alkenyl, optionally substituted C₂₋₃₀alkynyl, or optionally substituted C₁₋₃₀alkoxy, amino (NH₂), alkylamino, dialkylamino, heterocyclyl, arylamino, diarylamino, heteroarylamino, diheteroarylamino, amino acid, cyano, alkyl-thio-alkyl, thioalkoxy, cycloalkyl, aryl, or heteroaryl. R²³⁶ can be hydrogen, halogen, hydroxyl, protected hydroxyl, optionally substituted C₁₋₃₀alkyl, C₁₋₃₀haloalkyl, optionally substituted C₂₋₃₀alkenyl, optionally substituted C₂₋₃₀alkynyl, or optionally substituted C₁₋₃₀alkoxy, amino (NH₂), alkylamino, dialkylamino, heterocyclyl, arylamino, diarylamino, heteroarylamino, diheteroarylamino, amino acid, cyano, alkyl-thio-alkyl, thioalkoxy, cycloalkyl, aryl, or heteroaryl.

[0295] In some embodiments of any one of the aspects, when R²³ is —OR²³², R²³² can be hydrogen or a hydroxyl protecting group. For example, R²³² can be hydrogen, a hydroxyl protecting group or an alkyl group (e.g., methoxy) in some embodiments of any one of the aspects described herein.

[0296] When R²³ is —SR²³³, R²³³ can be hydrogen or a sulfur protecting group. Accordingly, in some embodiments of any one of the aspects, R²³³ is hydrogen.

[0297] When R²³ is —O(CH₂CH₂O)ᵣCH₂CH₂OR²³⁴, r can be 1-50; R²³⁴ is independently for each occurrence H, C₁-C₃₀alkyl, cyclyl, heterocyclyl, aryl, heteroaryl, aralkyl, sugar or R²³⁵; and R²³⁵ is independently for each occurrence amino (NH₂), alkylamino, dialkylamino, arylamino, diarylamino, heteroarylamino, or diheteroaryl amino.

[0298] When R²³ is —NH(CH₂CH₂NH)ₛCH₂CH₂—R²³⁵, s can be 1-50 and R²³⁵ can be independently for each occurrence amino (NH₂), alkylamino, dialkylamino, arylamino, diarylamino, heteroarylamino, or diheteroaryl amino.

[0299] In some embodiments of any one of the aspects described herein, R²³ is hydrogen, halogen, —OR²³², or optionally substituted C₁-C₃₀alkoxy. For example, R²³ is halogen, OR²³², or optionally substituted C₁-C₃₀alkoxy. In some embodiments of any one of the aspects described herein, R²³ is F, OH or optionally substituted C₁-C₃₀alkoxy.

[0300] In some embodiments of any one of the aspects described herein, R²³ is C₁-C₃₀alkoxy optionally substituted with 1, 2, 3, 4 or 5 substituents independently selected from OH, CN, SC(O)Ph, oxo (═O), SH, SO₂NH₂, SO₂(C₁-C₄)alkyl, SO₂NH(C₁-C₄)alkyl, halogen, carbonyl, thiol, cyano, NH₂, NH(C₁-C₄)alkyl, N[(C₁-C₄)alkyl]₂, C(O)NH₂, COOH, COOMe, acetyl, (C₁-C₈)alkyl, O(C₁-C₅)alkyl (i.e., C₁-C₈alkoxy), O(C₁-C₅)haloalkyl, (C₂-C₈)alkenyl, (C₂-C₈)alkynyl, haloalkyl, thioalkyl, cyanomethylene, alkylaminyl, aryl, heteroaryl, substituted aryl, NH₂—C(O)-alkylene, NH(Me)-C(O)-alkylene, CH₂—C(O)-alkyl, C(O)-alkyl, alkylcarbonylaminyl, CH₂—[CH(OH)]ₘ—(CH₂)ₚ—OH, CH₂—[CH(OH)]ₘ—(CH₂)ₚ—NH₂ or CH₂-aryl-alkoxy, where “m” and “p” are independently 1, 2, 3, 4, 5 or 6. For example, R²³ is C₁-C₃₀alkoxy optionally substituted with a NH₂, OH, C(O)NH₂, COOH, halo, SH, or C₁-C₆alkoxy. In some embodiments of any one of the aspects described herein, R²³ is —O(CH₂)ₜCH₃, where t is 1-21. For example, tis 14, 15, 16, 17 or 18. In one non-limiting example, t is 16.

[0301] In some embodiments of any one of the aspects, R²³ is —O(CH₂)ᵤR²³⁷, where u is 2-10; R²³⁷ is C₁-C₆alkoxy, amino (NH₂), CO₂H, OH or halo. For example, R²³⁷ is —CH₃ or NH₂. Accordingly, in some embodiments of any one of the aspects described herein, R²³ is —O(CH₂)ᵤ—OMe or R²³ is —O(CH₂)ᵤNH₂. In some embodiments of any one of the aspects described herein, u is 2, 3, 4, 5 or 6. For example, u is 2, 3 or 6. In one non-limiting example, u is 2. In another non-limiting example, u is 3 or 6.

[0302] In some embodiments of any one of the aspects described herein, R²³ is a C₁-Chaloalkyl. For example, R²³ is a C₁-C₄haloalkyl. In some embodiments of any one of the aspects described herein, R²³ is-CF₃, —CF₂CF₃, —CF₂CF₂CF₃ or —CF₂ (CF₃)₂.

[0303] In some embodiments of any one of the aspects described herein, R²³ is —OCH(CH₂OR²³⁸)CH₂OR²³⁹, where R²³⁸ and R²³⁹ independently are H, optionally substituted C₁-C₃₀alkyl, optionally substituted C₂-C₃₀alkenyl or optionally substituted C₂-C₃₀alkynyl. For example, R²³⁸ and R²³⁹ independently are optionally substituted C₁-C₃₀alkyl.

[0304] In some embodiments of any one of the aspects described herein, R²³ is —CH₂C(O)NHR²³¹⁰, where R²³¹⁰ is H, optionally substituted C₁-C₃₀alkyl, optionally substituted C₂-C₃₀alkenyl or optionally substituted C₂-C₃₀alkynyl. For example, R²³¹⁰ is H or optionally substituted C₁-C₃₀alkyl. In some embodiments, R²³¹⁰ is optionally substituted C₁-C₆alkyl.

### R²²

[0305] In some embodiments of any one of the aspects described herein, R²² is hydrogen, halogen, —OR²²², —SR²²³, optionally substituted C₁₋₃₀alkyl, C₁₋₃₀haloalkyl, optionally substituted C₂-30alkenyl, optionally substituted C₂₋₃₀alkynyl, or optionally substituted C₁₋₃₀alkoxy, amino (NH₂), alkylamino, dialkylamino, heterocyclyl, arylamino, diarylamino, heteroarylamino, diheteroarylamino, amino acid, —O(CH₂CH₂O)ᵣCH₂CH₂OR²²⁴, cyano, alkyl-thio-alkyl, thioalkoxy, cycloalkyl, aryl, heteroaryl, —NH(CH₂CH₂NH)ₛCH₂CH₂—R²²⁵, NHC(O)R²²⁶, a lipid, a linker covalently attached to a lipid, a ligand, a linker covalently attached to a ligand, or a reactive phosphorus group.

[0306] R²²² can be H, hydroxyl protecting group, optionally substituted C₁₋₃₀alkyl, C₁₋₃₀haloalkyl, optionally substituted C₂₋₃₀alkenyl, optionally substituted C₂₋₃₀alkynyl, or optionally substituted C₁₋₃₀alkoxy, cycloalkyl, heterocyclyl, aryl, heteroaryl. R²²³ can be H, sulfur protecting group, optionally substituted C₁₋₃₀alkyl, C₁₋₃₀haloalkyl, optionally substituted C₂₋₃₀alkenyl, optionally substituted C₂₋₃₀alkynyl, or optionally substituted C₁₋₃₀alkoxy, cycloalkyl, heterocyclyl, aryl, heteroaryl. R²²⁴ can be H, hydroxyl protecting group, optionally substituted C₁₋₃₀alkyl, C₁₋₃₀haloalkyl, optionally substituted C₂₋₃₀alkenyl, optionally substituted C₂₋₃₀alkynyl, or optionally substituted C₁₋₃₀alkoxy, cycloalkyl, heterocyclyl, aryl, heteroaryl. R²²⁵ can be hydrogen, halogen, hydroxyl, protected hydroxyl, optionally substituted C₁₋₃₀alkyl, C₁₋₃₀haloalkyl, optionally substituted C₂₋₃₀alkenyl, optionally substituted C₂₋₃₀alkynyl, or optionally substituted C₁₋₃₀alkoxy, amino (NH₂), alkylamino, dialkylamino, heterocyclyl, arylamino, diarylamino, heteroarylamino, diheteroarylamino, amino acid, cyano, alkyl-thio-alkyl, thioalkoxy, cycloalkyl, aryl, or heteroaryl. R²²⁶ can be hydrogen, halogen, hydroxyl, protected hydroxyl, optionally substituted C₁₋₃₀alkyl, C₁₋₃₀haloalkyl, optionally substituted C₂₋₃₀alkenyl, optionally substituted C₂₋₃₀alkynyl, or optionally substituted C₁₋₃₀alkoxy, amino (NH₂), alkylamino, dialkylamino, heterocyclyl, arylamino, diarylamino, heteroarylamino, diheteroarylamino, amino acid, cyano, alkyl-thio-alkyl, thioalkoxy, cycloalkyl, aryl, or heteroaryl.

[0307] In some embodiments of any one of the aspects described herein, R²² is hydrogen, halogen, —OR²²², —SR²²³, optionally substituted C₁₋₃₀alkyl, C₁₋₃₀haloalkyl, optionally substituted C₂₋₃₀alkenyl, optionally substituted C₂₋₃₀alkynyl, or optionally substituted C₁₋₃₀alkoxy, amino (NH₂), alkylamino, dialkylamino, heterocyclyl, arylamino, diarylamino, heteroarylamino, diheteroarylamino, amino acid, —O(CH₂CH₂O)ᵣCH₂CH₂OR²²⁴, cyano, alkyl-thio-alkyl, thioalkoxy, cycloalkyl, aryl, heteroaryl, —NH(CH₂CH₂NH)ₛCH₂CH₂-R^{225x}, NHC(O)R²²⁴.

[0308] In some embodiments of any one of the aspects described herein, R²² is hydrogen, hydroxyl, protected hydroxyl, halogen, optionally substituted C₁₋₃₀ alkyl, optionally substituted C₂₋₃₀alkenyl, optionally substituted C₂₋₃₀alkynyl, optionally substituted C₁₋₃₀ alkoxy, alkoxyalkyl (e.g., methoxyethyl), alkoxyalkylamine, alkoxyoxycarboxylate, amino, alkylamino, dialkylamino, —O—C₄₋₃₀alkyl-ON(CH₂R⁸)(CH₂R⁹), or —O—C₄₋₃₀alkyl-ON(CH₂R⁸)(CH₂R^{9x}. For example, R²² is hydrogen, hydroxyl, protected hydroxyl, halogen, optionally substituted C₁₋₃₀ alkoxy, alkoxyalkyl (e.g., methoxyethyl), alkoxyalkylamine, alkoxyoxycarboxylate, amino, alkylamino, or dialkylamino.

[0309] In some embodiments of any one of the aspects, R²² is hydrogen, hydroxyl, protected hydroxyl, halogen, optionally substituted C₁₋₃₀ alkoxy, or alkoxyalkyl (e.g., methoxyethyl. In some embodiments of any one of the aspects, R²² is hydrogen, hydroxyl, protected hydroxyl, fluoro or methoxy.

[0310] In some embodiments of any one of the aspects R²² is halogen. For example, R²² can be fluoro, chloro, bromo or iodo. In some embodiments of any one of the aspects described herein, R²² is fluoro.

[0311] In some embodiments of any one of the aspects described herein, R²² is hydrogen, fluoro or methoxy.

[0312] In some embodiments of any one of the aspects described herein, R²² and R²⁴ taken together are 4′-C(R¹⁰R¹¹)ᵥ—Y-2′ or 4′-Y—C(R¹⁰R¹¹)ᵥ-2′; v is 1, 2 or 3; where Y is —O—, —CH₂—, —CH(Me)-, —C(CH₃)₂—, —S—, —N(R¹²)—, —C(O)—, —C(S)—, —S(O)—, —S(O)₂—, —OC(O)—, —C(O)O—, —N(R¹²)C(O)—, or —C(O)N(R¹²)—; R¹⁰ and R¹¹ independently are H, optionally substituted C₁-C₆alkyl, optionally substituted C₂-C₆alkenyl or optionally substituted C₂-C₆alkynyl; R¹² is hydrogen, optionally substituted C₁₋₃₀alkyl, optionally substituted C₁-C₃₀alkoxy, C₁₄haloalkyl, optionally substituted C₂₋₄alkenyl, optionally substituted C₂₋₄alkynyl, optionally substituted C₁₋₃₀alky-CO₂H, or a nitrogen-protecting group. In some embodiments of any one of the aspects, v is 1. In some other embodiments of any one of the aspects, v is 2. In some embodiments, Y is O. For example, R² and R⁴ taken together are 4′-C(R¹⁰R¹¹)ᵥ—O-2′.

[0313] It is noted that R¹⁰ and R¹¹ attached to the same carbon can be same or different. For example, one of R¹⁰ and R¹¹ can be H and the other of the R¹⁰ and R¹¹ can be an optionally substituted C₁-C₆alkyl. In one non-limiting example, one of R¹⁰ and R¹¹ can be H and the other can be C₁-C₆alkyl, optionally substituted with 1, 2, 3, 4 or 5 substituents independently selected from OH, CN, SC(O)Ph, oxo (═O), SH, SO₂NH₂, SO₂(C₁-C₄)alkyl, SO₂NH(C₁-C₄)alkyl, halogen, carbonyl, thiol, cyano, NH₂, NH(C₁-C₄)alkyl, N[(C₁-C₄)alkyl]₂, C(O)NH₂, COOH, COOMe, acetyl, (C₁-C₅)alkyl, O(C₁-C₅)alkyl (i.e., C₁-C₈alkoxy), O(C₁-C₅)haloalkyl, (C₂-C₈)alkenyl, (C₂-C₈)alkynyl, haloalkyl, thioalkyl, cyanomethylene, alkylaminyl, aryl, heteroaryl, substituted aryl, NH₂—C(O)-alkylene, NH(Me)-C(O)-alkylene, CH₂C(O)-alkyl, C(O)-alkyl, alkylcarbonylaminyl, CH₂—[CH(OH)]ₘ—(CH₂)ₚ—OH, CH₂—[CH(OH)]ₘ—(CH₂)ₚ—NH₂ or CH₂-aryl-alkoxy, where “m” and “p” are independently 1, 2, 3, 4, 5 or 6. For example, R¹⁰ and R¹¹ independently are H or C₁-C₃₀alkyl optionally substituted with a NH₂, OH, C(O)NH₂, COOH, halo, SH, or C₁-C₆alkoxy. In some embodiments of any one of the aspects, one of R¹⁰ and R¹¹ is H and the other is C₁-C₆alkyl, optionally substituted with a C₁-C₆alkoxy. For example, one of R¹⁰ and R¹¹ is H and the other is —CH₃ or CH₂OCH₃.

[0314] In some embodiments of any one of the aspects, R¹⁰ and R¹¹ attached to the same C are the same. For example, R¹⁰ and R¹¹ attached to the same C are H.

[0315] In some embodiments of any one of the aspects, R²² and R²⁴ taken together are 4′-CH₂-0-2′, 4′—CH(CH₃)—O-2′, 4′—CH(CH₂OCH₃)—O-2′, or 4′-CH₂CH₂—O-2′. For example, R²² and R²⁴ taken together are 4′-CH₂CH₂—O-2′.

[0316] In some embodiments of any one of the aspects described herein, R²² is a bond to an internucleotide linkage to a subsequent nucleoside.

[0317] R²⁴

[0318] In some embodiments of any one of the aspects described herein, R²⁴ can be hydrogen, optionally substituted C₁₋₆alkyl, optionally substituted C₂₋₆alkenyl, optionally substituted C₂₋₆alkynyl, or optionally substituted C₁₋₆alkoxy. For example, R²⁴ can be hydrogen, optionally substituted C₁₋₆alkyl or optionally substituted C₁₋₆alkoxy.

[0319] In some embodiments of any one of the aspects described herein, R²⁴ is H.

### L¹

[0320] In some embodiments of any one of the aspects described herein, L′ can be a linker.

[0321] For example, L′ can be a direct bond or an atom such as oxygen or sulfur, a unit such as NRLL, C(O), C(O) O, C(O)NR¹, SO, SO₂, SO₂NH or a chain of atoms, such as substituted or unsubstituted alkyl, substituted or unsubstituted alkenyl, or substituted or unsubstituted alkynyl, where one or more methylenes can be interrupted or terminated by O, S, S(O), SO₂, N(RLL) 2, C(O), cleavable linking group, substituted or unsubstituted aryl, substituted or unsubstituted heteroaryl, substituted or unsubstituted heterocyclic; where R^{LL} is hydrogen, acyl, aliphatic or substituted aliphatic

[0322] In some embodiments of any one of the aspects described herein, L′ is a bond or an optionally substituted alkylene. For example, L′ is a bond. In some other non-limiting examples, L′ is substituted or unsubstituted alkyl, substituted or unsubstituted alkenyl, or substituted or unsubstituted alkynyl, where one or more methylenes can be interrupted or terminated by O, S, S(O), SO₂, N(R^{LL})₂, C(O), cleavable linking group, substituted or unsubstituted aryl, substituted or unsubstituted heteroaryl, substituted or unsubstituted heterocyclic.

[0323] In some embodiments of any one of the aspects described herein, L′ is a bond, -L³-, C₁₋₃₀alkylene, C₂₋₃₀alkenylene, C₂₋₃₀alkynylene, *-L³-C₁₋₃₀alkylene *-L³-C₂₋₃₀alkenylene, or *-L³-C₂₋₃₀alkynylene.

[0324] In some embodiments of any one of the aspects described herein L′ is L³, where L³ is —O—, —N(R¹³)—, —S—, —C(O)—, —S(O)—, —S(O)₂—, —P(X^{L3})(Y^{L3}R^{L3}B)—, where R^{L3} is hydrogen, optionally substituted C₁₋₃₀alkyl, optionally substituted C₁-C₃₀alkoxy, C₁₄haloalkyl, optionally substituted C₂₋₄alkenyl, optionally substituted C₂₋₄alkynyl, optionally substituted C₁₋₃₀alkyl-CO₂H, or a nitrogen-protecting group; X^{L2} is O or S; Y^{L3} is O, S, NH, or a bond; R^{L3B} is H or optionally substituted alkyl. In some embodiments, L³ is —O—.

[0325] In some embodiments of any one of the aspects described herein, L′ is C₁₋₃₀alkylene, C₂₋₃₀alkenylene, C₂₋₃₀alkynylene, *-L³-C₁₋₃₀alkylene *-L³-C₂₋₃₀alkenylene, or *-L³-C₂₋₃₀alkynylene, where * is bond to R^{H} and L³ is R^{L3} is hydrogen, optionally substituted C₁₋₃₀alkyl, optionally substituted C₁-C₃₀alkoxy, C₁₋₄haloalkyl, optionally substituted C₂₋₄alkenyl, optionally substituted C₂-4alkynyl, optionally substituted C₁₋₃₀alkyl-CO₂H, or a nitrogen-protecting group; X^{L2} is O or S; Y^{L3} is O, S, NH, or a bond; R^{L3B} is H or optionally substituted alkyl.

[0326] In some embodiments of the various aspects described herein, L′ is a bond, —O— or an optionally substituted alkylene. For example, L¹ is —O— or —(CH₂)ₙ—, where n is 0 or an integer selected from 1 to 20 (e.g., n is 1, 2, 3, 4, 5, 6, 7, 8, 9, 10, 11, 12, 13, 14, or 15, such as n is 1, 2, 3, 4, 5 or 6).

[0327] In some embodiments of any one of the aspects described herein, L′ is —O—. In some other embodiments of any one of the aspects described herein, L′ is methylene, i.e., —CH₂—. In still some other embodiments of any one of the aspects described herein L′ is a bond.

[0328] In some embodiments of any one of the aspects described herein, L′ is

[chemical structure]

[0329] where b′ is 0 or integer from 1 to 20 (e.g., b′ is 0, 1, 2, 3, 4, 5 or 6); and # is a bond to R^{H}. For example, L¹ is

[chemical structure]

### L²

[0330] In some embodiment of any one of the aspects described herein, L² is a linker. For example, L² can be a direct bond or an atom such as oxygen or sulfur, a unit such as NR¹, C(O), C(O) O, C(O)NR¹, SO, SO₂, SO₂NH or a chain of atoms, such as substituted or unsubstituted alkyl, substituted or unsubstituted alkenyl, or substituted or unsubstituted alkynyl, where one or more methylenes can be interrupted or terminated by O, S, S(O), SO₂, N(R^{LL})₂, C(O), cleavable linking group, substituted or unsubstituted aryl, substituted or unsubstituted heteroaryl, substituted or unsubstituted heterocyclic; where R^{LL} is hydrogen, acyl, aliphatic or substituted aliphatic

[0331] In some embodiments of any one of the aspects described herein, L² is a bond or an optionally substituted alkylene. For example, L² is a bond. In some other non-limiting examples, L² is substituted or unsubstituted alkyl, substituted or unsubstituted alkenyl, or substituted or unsubstituted alkynyl, where one or more methylenes can be interrupted or terminated by O, S, S(O), SO₂, N(R^{LL})₂, C(O), cleavable linking group, substituted or unsubstituted aryl, substituted or unsubstituted heteroaryl, substituted or unsubstituted heterocyclic. In some embodiments, L² is —Z—(CH₂)ₘ—, where Z is absent, aryl, heteroaryl, cycloalkyl or heterocyclyl; and m is 0 or an integer selected from 1 to 20 (e.g., m is 1, 2, 3, 4, 5, 6, 7, 8, 9, 10, 11, 12, 13, 14 or 15, such as m is 1, 2, 3, 4, 5 or 6). For example, L² is —(CH₂)ₘ— or —(CH₂)ₘ-phenyl-.

### L³

[0332] In embodiments of the various aspects described herein, L³ can be —O—, —N(R^{L3})—, —S—, —C(O)—, —S(O)—, —S(O)₂—, —P(X^{L3})(Y^{L3}R^{L3B})—. For example, L³ can be —O— in some embodiments of the any one of the aspects described herein. In some embodiments of anyone of the aspects described herein, L³ can be —N(R^{L3})—, —S—, —C(O)—, —S(O)— or —S(O)₂—. In yet some other embodiments of any one of the aspects described herein, L³ can be —N(R^{L3})—, —S— or —C(O)—. In still some other embodiments of any one of the aspects described herein L³ can be —P(X^{L3})(Y^{L3}R^{L3B})—.

### R^{H}

[0333] In some embodiments of any one of the aspects described herein, R^{H} is an optionally substituted 6-membered heterocyclyl comprising a nitrogen atom and 0, 1 or 2 additional

[chemical structure]

[0334] heteroatoms selected independently from N, O and S. For example, R^{H} is where X is O, NR^{L}, S, or CH₂; and R^{L} is hydrogen, a ligand, a linker covalently bonded to one or more ligands, aliphatic and aromatic alkyl, alkylester, alkylamine, dimethylamino alkyl, alkylether, alkylthioether, heteroaromatic alkyl, allyl, vinyl, alkyl groups functionalized with disulfide, oxime, ketone, acetal, hemiacetal, cleavable peptides, or cleavable sugars.

[chemical structure]

[0335] In some embodiments of any one of the aspects described herein, R^{H} is where X is O.

[0336] In some other embodiments of any one of the aspects described herein, R^{H} is

[chemical structure]

[0337] where X is NR^{L}. In some further embodiments, R^{L} is H or aliphatic and aromatic alkyl, alkylester, alkylamine, dimethylamino alkyl, alkylether, alkylthioether, heteroaromatic alkyl, allyl, vinyl, alkyl groups functionalized with disulfide, oxime, ketone, acetal, hemiacetal, cleavable peptides, or cleavable sugars. In yet some other embodiments of any one of the aspects described herein, R^{H} is a ligand or linker covalently bonded to one or more independently selected ligands.

[0338] In some embodiments of any one of the aspects described herein, R^{H} is

[chemical structure]

[0339] where X is O.

[0340] In some other embodiments of any one of the aspects described herein, R^{H} is

[chemical structure]

[0341] where X is NR^{L}. In some further embodiments, R^{L} is H or aliphatic and aromatic alkyl, alkylester, alkylamine, dimethylamino alkyl, alkylether, alkylthioether, heteroaromatic alkyl, allyl, vinyl, alkyl groups functionalized with disulfide, oxime, ketone, acetal, hemiacetal, cleavable peptides, or cleavable sugars. In yet some other embodiments of any one of the aspects described herein, R^{L} is a ligand or linker covalently bonded to one or more independently selected ligands.

[0342] R^{H2}

[0343] In some embodiments of any one of the aspects described herein, R^{H2} is an optionally substituted 6-membered heterocyclyl comprising a nitrogen atom and 0, 1 or 2 additional

[chemical structure]

[0344] heteroatoms selected independently from N, O and S. For example, R^{H2} is where X is O, NR^{L}, S, or CH₂; and R^{L} is hydrogen, a ligand, a linker covalently bonded to one or more ligands, aliphatic and aromatic alkyl, alkylester, alkylamine, dimethylamino alkyl, alkylether, alkylthioether, heteroaromatic alkyl, allyl, vinyl, alkyl groups functionalized with disulfide, oxime, ketone, acetal, hemiacetal, cleavable peptides, or cleavable sugars.

[chemical structure]

[0345] In some embodiments of any one of the aspects described herein, R^{H2} is where X is O.

[0346] In some other embodiments of any one of the aspects described herein, R^{H2} is

[chemical structure]

[0347] where X is NR^{L}. In some further embodiments, R^{L} is H or aliphatic and aromatic alkyl, alkylester, alkylamine, dimethylamino alkyl, alkylether, alkylthioether, heteroaromatic alkyl, allyl, vinyl, alkyl groups functionalized with disulfide, oxime, ketone, acetal, hemiacetal, cleavable peptides, or cleavable sugars. In yet some other embodiments of any one of the aspects described herein, R^{L} is a ligand or linker covalently bonded to one or more independently selected ligands.

[0348] In some embodiments of any one of the aspects described herein, one of R¹³ and R¹⁴ is an optionally substituted C₁-C₆alkyl. For example, one of R¹³ and R¹⁴ is methyl.

[0349] In some embodiments of any one of the aspects described herein, one of R¹³ and R¹⁴ is -L²-R^{H2} and the other is an optionally substituted C₁-C₆alkyl (e.g., methyl).

[0350] In some embodiments of any one of the aspects described herein, one of R¹³ and R¹⁴ is

[chemical structure]

[0351] and the other of R¹³ and R¹⁴ is C₁-C₆alkyl,

[chemical structure]

### R^{L}

[0352] In embodiments of the various aspects described herein, R^{L} can be hydrogen, a ligand, a linker covalently bonded to one or more ligands, aliphatic and aromatic alkyl, alkylester, alkylamine, dimethylamino alkyl, alkylether, alkylthioether, heteroaromatic alkyl, allyl, vinyl, alkyl groups functionalized with disulfide, oxime, ketone, acetal, hemiacetal, cleavable peptides, or cleavable sugars.

[0353] In some embodiments of any one of the aspects described herein, R^{L} is hydrogen, a ligand, a linker covalently bonded to one or more ligands, or optionally substituted aliphatic. For example, R^{L} is a ligand, a linker covalently bonded to one or more ligands.

[0354] In some embodiments of any one of the aspects described herein, R^{L} is -L⁴-L^{R}, where L⁴ is a linker and L^{R} is a ligand, a linker covalently bonded to one or more ligands, aliphatic and aromatic alkyl, alkylester, alkylamine, dimethylamino alkyl, alkylether, alkylthioether, heteroaromatic alkyl, allyl, vinyl, alkyl groups functionalized with disulfide, oxime, ketone, acetal, hemiacetal, cleavable peptides, or cleavable sugars. For example, L^{R} is a ligand.

[0355] In some embodiments of any one of the aspects described herein, L^{R} is aliphatic and aromatic alkyl, alkylester, alkylamine, dimethylamino alkyl, alkylether, alkylthioether, heteroaromatic alkyl, allyl, vinyl, alkyl groups functionalized with disulfide, oxime, ketone, acetal, hemiacetal, cleavable peptides, or cleavable sugars. For example, L^{R} is C₁₋₃₀alkyl, C₂₋₃₀alkenyl, C₂₋₃₀alkynyl, lipid, carbohydrate, folic acid, DUPA, RGD peptide, antibody, antibody fragment, peptide or other ligand.

[0356] In some embodiments of any one of the aspects described herein, L⁴ can be a direct bond or an atom such as oxygen or sulfur, a unit such as NRLL, C(O), C(O)O, C(O)NR¹, SO, SO₂, SO₂NH or a chain of atoms, such as substituted or unsubstituted alkyl, substituted or unsubstituted alkenyl, or substituted or unsubstituted alkynyl, where one or more methylenes can be interrupted or terminated by O, S, S(O), SO₂, N(R^{LL})₂, C(O), cleavable linking group, substituted or unsubstituted aryl, substituted or unsubstituted heteroaryl, substituted or unsubstituted heterocyclic; where R^{LL} is hydrogen, acyl, aliphatic or substituted aliphatic

[0357] In some embodiments of any one of the aspects described herein, L⁴ is a bond or an optionally substituted alkylene. For example, L⁴ is a bond. In some other non-limiting examples, L⁴ is substituted or unsubstituted alkyl, substituted or unsubstituted alkenyl, or substituted or unsubstituted alkynyl, where one or more methylenes can be interrupted or terminated by O, S, S(O), SO₂, N(R^{LL})₂, C(O), cleavable linking group, substituted or unsubstituted aryl, substituted or unsubstituted heteroaryl, substituted or unsubstituted heterocyclic. In some embodiments, L⁴ is —Z—(CH₂)ₘ—, where Z is absent, aryl, heteroaryl, cycloalkyl or heterocyclyl; and m is 0 or an integer selected from 1 to 20 (e.g., m is 1, 2, 3, 4, 5, 6, 7, 8, 9, 10, 11, 12, 13, 14 or 15, such as m is 1, 2, 3, 4, 5 or 6). For example, L⁴ is —(CH₂)ₘ— or —(CH₂)ₘ-phenyl-.

[0358] In some embodiments of any one of the aspects described herein, L⁴ comprises

[chemical structure]

[0359] where c′ is 0 or an integer from 1 to 20 (e.g., d′ is 0, 1, 2, 3, 4, 5 or 6). For

[chemical structure]

[0360] example, L⁴ comprises is 1.

[0361] In some embodiments, c′

[chemical structure]

[0362] In some embodiments of any one of the aspects described herein, R^{L} is where d′ is 0 or an integer from 1 to 20 (e.g., d′ is 0, 1, 2, 3, 4, 5 or 6). In some embodiments d′ is 1.

[0363] In some embodiments of any one of the aspects described herein, R^{L} is

[chemical structure]

[0364] where d′ is 0 or an integer from 1 to 20 (e.g., d′ is 0, 1, 2, 3, 4, 5 or 6). For R^{L} is

[chemical structure]

In some embodiments, d′ is 1.

[0365] In some embodiments of any one of the aspects described herein, R^{L} is —C(O)-L^{R}.

[0366] In some embodiment of any one of the aspects described herein, R^{L} is a nitrogen protecting group.

### B (Nucleobase)

[0367] In embodiments of the various aspects described herein, B is an optionally modified nucleobase. It is noted that the nucleobase can be a natural or non-natural nucleobase. By a “non-natural nucleobase” is meant a nucleobase other than adenine, guanine, cytosine, uracil, or thymine. Exemplary non-natural nucleobases include, but are not limited to, inosine, xanthine, hypoxanthine, nubularine, isoguanisine, tubercidine, and substituted or modified analogs of adenine, guanine, cytosine and uracil, such as 2-aminoadenine and other alkyl derivatives of adenine and guanine, 2-propyl and other alkyl derivatives of adenine and guanine, 5-halouracil and cytosine, 5-propynyl uracil and cytosine, 6-azo uracil, cytosine and thymine, 5-uracil (pseudouracil), 4-thiouracil, 5-halouracil, 5-(2-aminopropyl) uracil, 5-amino allyl uracil, 8-halo, amino, thiol, thioalkyl, hydroxyl and other 8-substituted adenines and guanines, 5-trifluoromethyl and other 5-substituted uracils and cytosines, 7-methylguanine, 5-substituted pyrimidines, 6-azapyrimidines and N-2, N-6 and O-6 substituted purines, including 2-aminopropyladenine, 5-propynyluracil and 5-propynylcytosine, dihydrouracil, 3-deaza-5-azacytosine, 2-aminopurine, 5-alkyluracil, 7-alkylguanine, 5-alkyl cytosine,7-deazaadenine, N6, N6-dimethyladenine, 2,6-diaminopurine, 5-amino-allyl-uracil, N3-methyluracil, substituted 1,2,4-triazoles, 2-pyridinone, 5-nitroindole, 3-nitropyrrole, uracil-5-oxyacetic 5-5-methoxyuracil, acid, methoxycarbonylmethyluracil, 5-methyl-2-thiouracil, 5-methoxycarbonylmethyl-2-thiouracil, 5-methylaminomethyl-2-thiouracil, 3-(3-amino-3carboxypropyl) uracil, 3-methylcytosine, 5-methylcytosine, N4-acetyl cytosine, 2-thiocytosine, N6-methyladenine, N6-isopentyladenine, 2-methylthio-N6-isopentenyladenine, N-methylguanines, or O-alkylated bases. Further purines and pyrimidines include those disclosed in U.S. Pat. No. 3,687,808, those disclosed in the Concise Encyclopedia of Polymer Science and Engineering, pages 858-859, Kroschwitz, J. I., ed. John Wiley & Sons, 1990, and those disclosed by Englisch et al., Angewandte Chemie, International Edition, 1991, 30, 613, content of all which is incorporated herein by reference.

[0368] In some embodiments, the non-natural nucleobase can be selected from the group consisting of inosine, xanthine, hypoxanthine, nubularine, isoguanisine, tubercidine, 2-(halo) adenine, 2-(alkyl) adenine, 2-(propyl) adenine, 2-(amino) adenine, 2-(aminoalkyll) adenine, 2-(aminopropyl) adenine, 2-(methylthio)-N6-(isopentenyl) adenine, 7-(deaza) adenine, 8-(alkenyl) adenine, 8-(alkyl) adenine, 8-(alkynyl) adenine, 8-(amino) adenine, 8-(halo) adenine, 8-(hydroxyl) adenine, 8-(thioalkyl) adenine, 8-(thiol) adenine, N6-(isopentyl) adenine, N6-(methyl) adenine, N°, N6-(dimethyl) adenine, 2-(alkyl) guanine,2-(propyl) guanine, 6-(alkyl) guanine, 6-(methyl) guanine, 7-(alkyl) guanine, 7-(methyl) guanine, 7-(deaza) guanine, 8-(alkyl) guanine, 8-(alkenyl) guanine, 8-(alkynyl) guanine, 8-(amino) guanine, 8-(halo) guanine, 8-(hydroxyl) guanine, 8-(thioalkyl) guanine, 8-(thiol) guanine, N-(methyl) guanine, 2-(thio) cytosine, 3-(deaza)-5-(aza) cytosine, 3-(alkyl) cytosine, 3-(methyl) cytosine, 5-(alkyl) cytosine, 5-(alkynyl) cytosine, 5-(halo) cytosine, 5-(methyl) cytosine, 5-(propynyl) cytosine, 5-(propynyl) cytosine, 5-(trifluoromethyl) cytosine, 6-(azo) cytosine, N4-(acetyl) cytosine, 3-(3-amino-3-carboxypropyl) uracil, 2-(thio) uracil, 5-(methyl)-2-(thio) uracil, 5-(methylaminomethyl)-2-(thio) uracil, 4-(thio) uracil, 5-(methyl)-4-(thio) uracil, 5-(methylaminomethyl)-4-(thio) uracil, 5-(methyl)-2,4-(dithio) uracil, 5-(methylaminomethyl)-2,4-(dithio) uracil, 5-(2-aminopropyl) uracil, 5-(alkyl) uracil, 5-(alkynyl) uracil, 5-(allylamino) uracil, 5-(aminoallyl) uracil, 5-(aminoalkyl) uracil, 5-(guanidiniumalkyl) uracil, 5-(1,3-diazole-1-alkyl) uracil, 5-(cyanoalkyl) uracil, 5-(dialkylaminoalkyl) uracil, 5-(dimethylaminoalkyl) uracil, 5-(halo) uracil, 5-(methoxy) uracil, uracil-5-oxyacetic acid, 5-(methoxycarbonylmethyl)-2-(thio) uracil, 5-(methoxycarbonyl-methyl) uracil, 5-(propynyl) uracil, 5-(propynyl) uracil, 5-(trifluoromethyl) uracil, 6-(azo) uracil, dihydrouracil, N³-(methyl) uracil, 5-uracil (i.e., pseudouracil), 2-(thio) pseudouracil,4-(thio) pseudouracil,2,4-(dithio) psuedouracil,5-(alkyl) pseudouracil, 5-(methyl) pseudouracil, 5-(alkyl)-2-(thio) pseudouracil, 5-(methyl)-2-(thio) pseudouracil, 5-(alkyl)-4-(thio) pseudouracil, 5-(methyl)-4-(thio) pseudouracil, 5-(alkyl)-2,4-(dithio) pseudouracil, 5-(methyl)-2,4-(dithio) pseudouracil, 1-substituted pseudouracil, 1-substituted 2 (thio)-pseudouracil, 1-substituted 4-(thio) pseudouracil, 1-substituted 2,4-(dithio) pseudouracil, 1-(aminocarbonylethylenyl)-pseudouracil, 1-(aminocarbonylethylenyl)-2 (thio)-pseudouracil, 1-(aminocarbonylethylenyl)-4-(thio) pseudouracil, 1-(aminocarbonylethylenyl)-2,4-(dithio) pseudouracil, 1-(aminoalkylaminocarbonylethylenyl)-pseudouracil, 1-(aminoalkylamino-carbonylethylenyl)-2 (thio)-pseudouracil, 1-(aminoalkylaminocarbonylethylenyl)-4-(thio) pseudouracil, 1-(aminoalkylaminocarbonylethylenyl)-2,4-(dithio) pseudouracil, 1,3-(diaza)-2-(oxo)-phenoxazin-1-yl, 1-(aza)-2-(thio)-3-(aza)-phenoxazin-1-yl, 1,3-(diaza)-2-(oxo)-phenthiazin-1-yl, 1-(aza)-2-(thio)-3-(aza)-phenthiazin-1-yl, 7-substituted 1,3-(diaza)-2-(oxo)-phenoxazin-1-yl, 7-substituted 1-(aza)-2-(thio)-3-(aza)-phenoxazin-1-yl, 7-substituted 1,3-(diaza)-2-(oxo)-phenthiazin-1-yl, 7-substituted 1-(aza)-2-(thio)-3-(aza)-phenthiazin-1-yl, 7-(aminoalkylhydroxyl)-1,3-(diaza)-2-(oxo)-phenoxazin-1-yl, 7-(aminoalkylhydroxyl)-1-(aza)-2-(thio)-3-(aza)-phenoxazin-1-yl, 7-(aminoalkylhydroxyl)-1,3-(diaza)-2-(oxo)-phenthiazin-1-yl, 7-(aminoalkylhydroxyl)-1-(aza)-2-(thio)-3-(aza)-phenthiazin-1-yl, 7-(guanidiniumalkylhydroxyl)-1,3-(diaza)-2-(oxo)-phenoxazin-1-yl, 7-(guanidiniumalkylhydroxyl)-1-(aza)-2-(thio)-3-(aza)-phenoxazin-1-yl, 7-(guanidiniumalkyl-hydroxyl)-1,3-(diaza)-2-(oxo)-phenthiazin-1-yl, 7-(guanidiniumalkylhydroxyl)-1-(aza)-2-(thio)-3-(aza)-phenthiazin-1-yl, 1,3,5-(triaza)-2,6-(dioxa)-naphthalene, inosine, xanthine, hypoxanthine, nubularine, tubercidine, isoguanisine, inosinyl, 2-aza-inosinyl, 7-deaza-inosinyl, nitroimidazolyl, nitropyrazolyl, nitrobenzimidazolyl, nitroindazolyl, aminoindolyl, pyrrolopyrimidinyl, 3-(methyl) isocarbostyrilyl, 5-(methyl) isocarbostyrilyl, 3-(methyl)-7-(propynyl) isocarbostyrilyl, 7-(aza) indolyl, 6-(methyl)-7-(aza) indolyl, imidizopyridinyl, 9-(methyl)-imidizopyridinyl, pyrrolopyrizinyl, isocarbostyrilyl, 7-(propynyl) isocarbostyrilyl, propynyl-7-(aza) indolyl, 2,4,5-(trimethyl)phenyl, 4-(methyl) indolyl, 4,6-(dimethyl) indolyl, phenyl, napthalenyl, anthracenyl, phenanthracenyl, pyrenyl, stilbenyl, tetracenyl, pentacenyl, difluorotolyl, 4-(fluoro)-6-(methyl)benzimidazole, 4-(methyl)benzimidazole, 6-(azo) thymine, 2-pyridinone, 5-nitroindole, 3-nitropyrrole, 6-(aza)pyrimidine, 2-(amino) purine, 2,6-(diamino) purine, 5-substituted pyrimidines, N²-substituted purines, N⁶-substituted purines, 06-substituted purines, substituted 1,2,4-triazoles, and any O-alkylated or N-alkylated derivatives thereof.

[0369] In some embodiments, a non-natural nucleobase is a modified nucleobase, i.e., the nucleobase comprises a nucleobase modification described herein, e.g., the nucleobase is a substituted or modified analog of any of the natural nucleobases. Examples of the nucleobase modifications include, but not limited to: C-5 pyrimidine with an alkyl group or aminoalkyls and other cationic groups such as guanidinium and amidine functionalities, N²- and N⁶- with an alkyl group or aminoalkyls and other cationic groups such as guanidinium and amidine functionalities of purines, G-clamps, guanidinium G-clamps, and pseudouridine known in the art.

[0370] In some embodiments of any one of the aspects, the non-natural nucleobase is a universal nucleobase. As used herein, a universal nucleobase is any modified or unmodified natural or non-natural nucleobase that can base pair with all of adenine, cytosine, guanine and uracil without substantially affecting the melting behavior, recognition by intracellular enzymes or activity of the oligonucleotide comprising the universal nucleobase. Some exemplary universal nucleobases include, but are not limited to, 2,4-difluorotoluene, nitropyrrolyl, nitroindolyl, 8-aza-7-deazaadenine, 4-fluoro-6-methylbenzimidazle, 4-methylbenzimidazle, 3-methyl isocarbostyrilyl, 5-methyl isocarbostyrilyl, 3-methyl-7-propynyl isocarbostyrilyl, 7-azaindolyl, 6-methyl-7-azaindolyl, imidizopyridinyl, 9-methyl-imidizopyridinyl, pyrrolopyrizinyl, isocarbostyrilyl, 7-propynyl isocarbostyrilyl, propynyl-7-azaindolyl, 2,4,5-trimethylphenyl, 4-methylinolyl, 4,6-dimethylindolyl, phenyl, napthalenyl, anthracenyl, phenanthracenyl, pyrenyl, stilbenyl, tetracenyl, pentacenyl, and structural derivatives thereof.

[0371] In some embodiments of any one of the aspects described herein, the non-matural nucleobase is a protected nucleobase. As used herein, a “protected nucleobase” refers to a nucleobase comprising a nitrogen protecting group, and/or an oxygen protecting group, and/or a sulfur protecting group.

[0372] In some embodiments of any one of the aspects described herein, the non-natural nucleobase is a modified, protected or substituted analogs of a nucleobase selected from adenine, cytosine, guanine, thymine, and uracil.

[0373] In some embodiments of any one of the aspects described herein, the nucleobase is a pyrimidine modified at the C₄ position.

[0374] In some embodiments of any one of the aspects described herein, the nucleobase is a pyrimidine modified at the C₅ position.

[0375] In some embodiments of any one of the aspects described herein, the nucleobase is a purine modified at the N2 position. In some embodiments of any one of the aspects described herein, the nucleobase is a purine modified at the N6 position.

[0376] In some embodiments of any one of the aspects described herein, the nucleobase is a purine modified at the C₆ position.

[0377] In some embodiments of any one of the aspects described herein, the nucleobase is a N-7 deaza purine, optionally modified at the N7 position.

### Double-Stranded RNAs

[0378] The skilled person is well aware that double-stranded RNAs comprising a duplex structure of between 20 and 23, but specifically 21, base pairs have been hailed as particularly effective in inducing RNA interference (Elbashir et al., EMBO 2001, 20:6877-6888). However, others have found that shorter or longer double-stranded oligonucleotides can be effective as well.

[0379] Accordingly, in one aspect, provided herein is a double-stranded RNA (dsRNA) comprising a first strand (also referred to as an antisense strand or a guide strand) and a second strand (also referred to as a sense strand or passenger strand, wherein at least one of the first (i.e., the antisense strand) or the second strand (i.e., the sense strand) is an oligonucleotide described herein. In other words, at least one of the first (i.e., the antisense strand) or the second strand (i.e., the sense strand) comprises at least one nucleotide of Formula (II).

[0380] In some embodiments of any one of the aspects described herein, the sense strand is an oligonucleotide described herein. In other words, the sense strand comprises at least one nucleotide of Formula (II). In some embodiments of any one of the aspects described herein, the antisense strand is an oligonucleotide described herein. In other words, the antisense strand comprises at least one nucleotide of Formula (II). Preferably, the sense strand comprises at least one nucleotide of Formula (II).

[0381] In some embodiments of the various aspects described herein, the antisense strand is substantially complementary to a target nucleic acid, e.g., a target gene or mRNA gene and the dsRNA is capable of inducing targeted cleavage of the target nucleic acid.

[0382] For the dsRNA molecules to be more effective in vivo, the antisense strand must have some metabolic stability. In other words, for the dsRNA molecules to be more effective in vivo, some amount of the antisense stand may need to be present in vivo after a period time after administration. Accordingly, in some embodiments, at least 40%, for example at least 45%, at least 50%, at least 55%, at least 60%., at least 65%, at least 70%, at least 75%, or at least 80% of the antisense strand of the dsRNA is present in vivo, for example in mouse liver, at day 5 after in vivo administration. In some embodiments, at least 40%, for example at least 45%, at least 50%, at least 55%, at least 60%., at least 65%, at least 70%, at least 75%, or at least 80% of the antisense strand of the dsRNA is present in vivo, for example in mouse liver, at day 6 after in vivo administration. In some embodiments, at least 40%, for example at least 45%, at least 50%, at least 55%, at least 60%, at least 65%, at least 70%, at least 75%, or at least 80% of the antisense strand of the dsRNA is present in vivo, for example in mouse liver, at day 7 after in vivo administration. In some embodiments, at least 40%, for example at least 45%, at least 50%, at least 55%, at least 60%, at least 65%, at least 70%, at least 75%, or at least 80% of the antisense strand of the dsRNA is present in vivo, for example in mouse liver, at day 8 after in vivo administration. In some embodiments, at least 40%, for example at least 45%, at least 50%, at least 55%, at least 60%., at least 65%, at least 70%, at least 75%, or at least 80% of the antisense strand of the dsRNA is present in vivo, for example in mouse liver, at day 9 after in vivo administration. In some embodiments, at least 40%, for example at least 45%, at least 50%, at least 55%, at least 60%., at least 65%, at least 70%, at least 75%, or at least 80% of the antisense strand of the dsRNA is present in vivo, for example in mouse liver, at day 10 after in vivo administration. In some embodiments, at least 40%, for example at least 45%, at least 50%, at least 55%, at least 60%., at least 65%, at least 70%, at least 75%, or at least 80% of the antisense strand of the dsRNA is present in vivo, for example in mouse liver, at day 11 after in vivo administration. In some embodiments, at least 40%, for example at least 45%, at least 50%, at least 55%, at least 60%., at least 65%, at least 70%, at least 75%, or at least 80% of the antisense strand of the dsRNA is present in vivo, for example in mouse liver, at day 12 after in vivo administration. In some embodiments, at least 40%, for example at least 45%, at least 50%, at least 55%, at least 60%., at least 65%, at least 70%, at least 75%, or at least 80% of the antisense strand of the dsRNA is present in vivo, for example in mouse liver, at day 13 after in vivo administration. In some embodiments, at least 40%, for example at least 45%, at least 50%, at least 55%, at least 60%., at least 65%, at least 70%, at least 75%, or at least 80% of the antisense strand of the dsRNA is present in vivo, for example in mouse liver, at day 14 after in vivo administration. In some embodiments, at least 40%, for example at least 45%, at least 50%, at least 55%, at least 60%., at least 65%, at least 70%, at least 75%, or at least 80% of the antisense strand of the dsRNA is present in vivo, for example in mouse liver, at day 15 after in vivo administration.

### Strand Lengths

[0383] Embodiments of the various aspects described herein include a double-stranded nucleic acid, e.g., dsRNA comprising an antisense strand and a sense strand. It is noted that each strand can range from 12-40 nucleotides in length. For example, each strand independently can be between 14-40 nucleotides in length, 17-37 nucleotides in length, 25-37 nucleotides in length, 27-35 nucleotides in length, 17-23 nucleotides in length, 17-21 nucleotides in length, 17-19 nucleotides in length, 19-25 nucleotides in length, 19-23 nucleotides in length, 19-21 nucleotides in length, 21-25 nucleotides in length, 21-23 nucleotides in length, 25-35 nucleotides in length, 26-35 nucleotides in length, 27-34 nucleotides in length, 28-32 nucleotides in length or 29-31 nucleotides in length. Without limitations, the sense and antisense strands can be equal length or unequal length. In some embodiments, the antisense strand is longer, e.g., by 1, 2, 3, 4, or 5 nucleotides than the sense strand.

[0384] In some embodiments, the antisense strand is of length 18 to 35 nucleotides. In some embodiments, the antisense strand is 21-25, 19-25, 19-21, 21-23 nucleotides in length. In some embodiments, the antisense strand is 21, 22, 23, 24, 25, 26, 27, 28, 29, 30, 31 or 32 nucleotides in length. In some embodiments, the antisense strand is 21, 22, 23, 24, or 25 nucleotides in length. In some preferred embodiments, the antisense strand is 22, 23 or 25 nucleotides in length.

[0385] Similar to the antisense strand, the sense strand can be, in some embodiments, 18-35 nucleotides in length. In some embodiments, the sense strand is 21-25, 19-25, 19-21 or 21-23 nucleotides in length. In some embodiments, the antisense strand is 19, 20, 21, 22, 23, 24, 25, 26, 27, 28 or 29 nucleotides in length. In some embodiments, the antisense strand is 19, 21, 22 or 23 nucleotides in length. In some preferred embodiments, the sense strand is 21 nucleotides in length.

[0386] In some embodiments of any one of the aspects described herein, the sense strand is 15 nucleotides in length and the antisense strand is 18, 19, 20, 21, or 22 (e.g., 20) nucleotides in length. In some embodiments of any one of the aspects described herein, the sense strand is 19 nucleotides in length and the antisense strand is 19, 20, or 21 nucleotides in length. In some embodiments of any one of the aspects described herein, the sense strand is 20 nucleotides in length and the antisense strand is 20, 21, or 22 nucleotides in length. In some embodiments of any one of the aspects described herein, the sense strand is 21 nucleotides in length and the antisense strand is 21, 22, or 23 nucleotides in length. In some embodiments of any one of the aspects described herein, the sense strand is 20-24 (e.g., 22) nucleotides in length and the antisense strand is 34-38 (e.g. 36) nucleotides in length.

[0387] In some embodiments, the antisense strand is 21, 22 or 25 nucleotides in length and the sense strand is 21 nucleotides in length.

### Double-Stranded Region

[0388] The sense strand and antisense strand typically form a double-stranded or duplex region. Generally, the duplex region (double-stranded region) is 12-40 nucleotide base pairs in length, 15-35 nucleotide base pairs in length, 17-30 nucleotide base pairs in length, 25-35 nucleotides base pairs in length, 27-35 nucleotide base pairs in length, 17-23 nucleotide base pairs in length, 17-21 nucleotide base pairs in length, 17-19 nucleotide base pairs in length, 19-25 nucleotide pairs in length, 19-23 nucleotide base pairs in length, 19-21 nucleotide base pairs in, 21-25 nucleotide base pairs in length, or 21-23 nucleotide base pairs in length. For example, the dsRNA has a duplex region of 15-35 nucleotide pairs in length. In some embodiments, the dsRNA has a duplex region of 18, 19, 20, 21, 22, 22, 23, 24, 25, 26, 27, 28, 29, 30 or 31 nucleotide base pairs in length. In some embodiments, the dsRNA has a duplex region of 19, 20, 21, 22 or 23 nucleotide base pairs in length. In some preferred embodiments, the dsRNA has a duplex region of 21 nucleotide base pairs in length.

### Overhangs

[0389] In some embodiments, the dsRNA comprises one or more overhang regions (i.e., single-stranded region) and/or capping groups of strands at the 3′-end, or 5′-end, or both ends of a strand. Without limitations, the overhang can be 1-10 nucleotides in length, 1-6 nucleotides in length, 1-5 nucleotides in length, 1-4 nucleotides in length, 1-3 nucleotides in length, 2-6 nucleotides in length, 2-5 nucleotides in length 2-4 nucleotides in length, 2-3 nucleotides in length, or 1-2 nucleotides in length. The overhangs can be the result of one strand being longer than the other, or the result of two strands of the same length being staggered. The overhang can form a mismatch with the sequence being targeted or it can be complementary to the sequence being targeted or can be other sequence. The first and second strands can also be joined, e.g., by additional bases to form a hairpin, or by other non-base linkers. Without limitations the overhang can be present at the 3′-end of the sense strand, antisense strand or both strands.

[0390] In some embodiments, the dsRNA comprises a single overhang. For example, the dsRNA has a single overhang and the overhang is at least two, three, four, five, six, seven, eight, nine, or ten nucleotides in length. In some embodiments, the overhang is present at the 3′-end of the antisense strand. In some particular embodiments, the dsRNA comprises a two nucleotide overhang at the 3′-end of the antisense strand.

[0391] The dsRNA can also have a blunt end. For example, one end of the dsRNA is a blunt end and the other end has an overhang. Without limitations, the blunt end can be located at the 5′-end of the antisense strand (or the 3′-end of the sense strand) or vice versa. Generally, the antisense strand of the dsRNA has a nucleotide overhang at the 3′-end, and the 5′-end is blunt. In some embodiments, the dsRNA has a 2 nucleotide overhang on the 3′-end of the antisense strand and a blunt end at the 5′-end of the antisense strand.

[0392] In some other embodiments, the dsRNA has two blunt ends, i.e., at both ends of the dsRNA.

[0393] The nucleotides in the overhang region can each independently be a modified or unmodified nucleotide including, but not limited to 2′-sugar modified, such as, 2′-fluoro, 2′-O-methyl, thymidine (T), 2′-O-methoxyethyl-5-methyluridine, 2′-O-methoxyethyladenosine, 2′-O-methoxyethyl-5-methylcytidine, GNA, SNA, hGNA, hhGNA, mGNA, TNA, h′GNA, and any combinations thereof. For example, TT (or UU) can be an overhang sequence for either end on either strand. The 5′- or 3′-overhangs at the sense strand, antisense strand or both strands can be phosphorylated. In some embodiments, the overhang region contains two nucleotides having a phosphorothioate internucleotide linkage between the two nucleotides, where the two nucleotides in the overhang region can be the same or different.

[0394] The internucleoside linkages in the overhang region can be a modified or unmodified internucleotide linkage. For example, the overhang region can comprise one, e.g., two or more, phosphorothioate internucleoside linkages.

### Nucleic Acid Modifications

[0395] In some embodiments of any one of the aspects, the oligonucleotide or double-stranded nucleic acid described herein can comprise one or more nucleic acid modifications. For example, the oligonucleotide or double-stranded nucleic acid described herein can comprise at least one, e.g., e.g., two, three, four, five, six, seven, eight, nine, ten, eleven, twelve, thirteen, fourteen, fifteen or more nucleic acid modifications. It is noted that when two are more modifications are present, they can be same, different or some combination of same and different. Further, the modifications all can be present in one strand of the double-stranded nucleic acid. In some embodiments, both strands of the double-stranded nucleic acid comprise at least one nucleic acid modification. When both strands comprise at least one modification, the modifications can be same, different or some combination of same and different.

### 2′-Fluoro Modified Nucleotides

[0396] In some embodiments, the oligonucleotide or dsRNA described herein can further comprise 2′-fluoro nucleotides, i.e., 2′-fluoro modifications. For example, the oligonucleotide or dsRNA described herein can comprise at least one, e.g., two, three, four, five, six, seven, eight, nine, ten, eleven, twelve, thirteen, fourteen, fifteen or more 2′-fluoro nucleotides. It is noted that the 2′-fluoro nucleotides all can be present in one strand of the dsRNA.

[0397] The antisense strand can comprise at least one or more 2′-fluoro nucleotides. For example, the antisense strand can comprise at least two (e.g., two, three, four, five, six, seven, eight, nine, ten or more) further 2′-fluoro nucleotides. In some embodiments, the antisense strand comprises one, two, three, four, five or six 2′-fluoro nucleotides. Without limitations, the additional 2′-fluoro modification(s) in the antisense strand can be present at any position. In some embodiments, the antisense strand comprises at least three 2′-fluoro nucleotides. For example, the antisense strand comprises a 2′-fluoro nucleotide at least at positions 2, 14 and 16 from the 5′-end. In some other embodiments, the antisense comprises at least four 2′-fluoro nucleotides. For example, the antisense comprises a 2′-fluoro nucleotide at least at positions 2, 6, 14 and 16 from the 5′-end. In some further embodiments, the antisense strand comprises at least five 2′-fluoro nucleotides. For example, the antisense strand comprises a 2′-fluoro nucleotide at least at positions 2, 6, 9, 14 and 16 from the 5′-end. In still some further embodiments, the antisense strand comprises at least six 2′-fluoro nucleotides. For example, the antisense strand comprises a 2′-fluoro nucleotide at least at positions 2, 6, 8, 9, 14 and 16 from the 5′-end.

[0398] In some embodiments, the antisense strand comprises at least one 2′-fluoro nucleotide adjacent to a destabilizing modification. For example, the 2′-fluoro nucleotide can be the nucleotide at the 5′-end or the 3′-end of a destabilizing modification, i.e., at position-1 or +1 from the position of the destabilizing modification. In some embodiments, the antisense strand comprises a 2′-fluoro nucleotide at each of the 5′-end and the 3′-end of the destabilizing modification, i.e., positions-1 and +1 from the position of the destabilizing modification. In some embodiments, the antisense strand comprises at least two 2′-fluoro nucleotides at the 3′-end of the destabilizing modification, i.e., at positions+1 and +2 from the position of the destabilizing modification.

[0399] In some embodiments, the antisense strand does not comprise a 2′-fluoro nucleotide at positions 3-9, counting from 5′-end.

[0400] The sense strand can comprise at least one or more 2′-fluoro nucleotides. For example, the antisense strand can comprise at least two (e.g., two, three, four, five, six, seven, eight, nine, ten or more) 2′-fluoro nucleotides. In some embodiments, the sense strand comprises one, two, three, four, or five 2′-fluoro nucleotides. For example, the sense strand comprises three or four 2′-fluoro nucleotides. Without limitations, a 2′-fluoro modification in the sense strand can be present at any positions. In some embodiments, the sense strand comprises at least three 2′-fluoro nucleotides. For example, the sense comprises a 2′-fluoro nucleotide at least at positions 7, 9 and 11 from the 5′-end or at positions 11, 13 and 15, counting from the 3′-end. In some other embodiments, the sense strand comprises at least four 2′-fluoro nucleotides. For example, the sense comprises a 2′-fluoro nucleotide at least at positions 7, 9, 10 and 11 from the 5′-end or at positions 11, 12, 13 and 15, counting from the 3′-end. In some embodiments of any one of the aspects described herein, the sense strand comprises a 2′-fluoro nucleotide at positions 9, 10, and 11, counting from the 5′-end of the sense strand or at positions 11, 12, and 13 counting from the 3′-end of the sense strand. In some embodiments, the sense strand comprises a block of two, three or four 2′-fluoro nucleotides.

[0401] In some embodiments, the sense strand comprises 2′-fluoro nucleotides at positions opposite or complimentary to positions 11, 12 and 15 of the antisense strand, counting from the 5′-end of the antisense strand. In some other embodiments, the sense strand comprises 2′-fluoro nucleotides at positions opposite or complimentary to positions 11, 12, 13, and 15 of the antisense strand, counting from the 5′-end of the antisense strand.

[0402] In some embodiments, the sense strand comprises a block of two, three or four 2′-fluoro nucleotides.

[0403] In some embodiments, the sense strand does not comprise a 2′-fluoro nucleotide in position opposite or complimentary to a thermally destabilizing modification of the duplex in the antisense strand.

[0404] In some embodiments, both the sense and the antisense strands comprise at least one, e.g., at least two 2′-fluoro nucleotides. The 2′-fluoro modification can occur on any nucleotide of the sense strand or antisense strand. For instance, the 2′-fluoro modification can occur on every nucleotide on the sense strand and/or antisense strand; each 2′-fluoro modification can occur in an alternating pattern on the sense strand or antisense strand; or the sense strand and antisense strand both comprise 2′-fluoro modifications in an alternating pattern. The alternating pattern of the 2′-fluoro modifications on the sense strand can be the same or different from the antisense strand, and the alternating pattern of the 2′-fluoro modifications on the sense strand can have a shift relative to the alternating pattern of the 2′-fluoro modifications on the antisense strand.

### 2′-Deoxy (2′-H, DNA) Nucleotides

[0405] In some embodiments, the oligonucleotide or dsRNA described herein can further comprise 2′-deoxy (e.g., 2′-H or DNA) nucleotides. For example, the oligonucleotide or dsRNA described herein can comprise at least one, e.g., two, three, four, five, six, seven, eight, nine, ten, eleven, twelve, thirteen, fourteen, fifteen or more DNA nucleotides. It is noted that the DNA nucleotides all can be present in one strand in the dsRNA of the dsRNA.

[0406] In some embodiments, the antisense strand can comprise at least one (e.g., two, three, four, five, six, seven, eight, nine, ten or more) DNA nucleotides. In some embodiments, the antisense strand comprises two, three, four, five or six DNA nucleotides. Without limitations, the DNA nucleotides in the antisense strand can be present at any position. For example, the antisense strand comprises a 2′-deoxy nucleotide at 1, 2, 3, 4, 5 or 6 of positions 2, 5, 7, 12, 14 and 16, counting from 5′-end of the antisense strand. In one non-limiting example, the antisense strand comprises a 2′-deoxy nucleotide at 1, 2, 3 or 4 of positions 2, 5, 7, and 12, counting from 5′-end of the antisense strand.

[0407] In some embodiments, the antisense comprises a 2′-deoxy nucleotide at position 2 or 12, counting from 5′-end of the antisense strand. For example, the antisense comprises a 2′-deoxy nucleotide at position 12, counting from 5′-end of the antisense strand. In some embodiments, the antisense comprises a 2′-deoxy nucleotide at positions 5 and 7, counting from 5′-end of the antisense strand. For example, the antisense strand comprises a 2′-deoxy nucleotide at positions 5, 7 and 12, counting from 5′-end of the antisense strand. In some embodiments, the antisense strand comprises a 2′-deoxy nucleotide at positions 2, 5 and 7, counting from 5′-end of the antisense strand. In some other embodiments, the antisense comprises at least four DNA nucleotides. For example, the antisense comprises a DNA nucleotide at least at positions 2, 5, 7 and 12, counting from the 5′-end. In some further embodiments, the antisense strand comprises at least five DNA nucleotides. In still some further embodiments, the antisense strand comprises at least six DNA nucleotides. For example, the antisense strand comprises a DNA nucleotide at least at positions 2, 5, 7, 12, 14 and 16, counting from the 5′-end.

[0408] In some embodiments of any one of the aspects described herein, the antisense strand comprises a DNA nucleotide at positions 2, 5, 7, and 12 counting from the 5′-end of the antisense strand; and a 2′-fluoro nucleotide at position 14 of the antisense strand.

[0409] As described herein, the dsRNA can comprise at least one, e.g., at least two, at least three, at least four, at least five, at least six, at least seven or more, 2′-deoxy modifications in a central region of the sense strand and/or the antisense strand. For example, at least one of the sense stand and the antisense can comprise at least one, e.g., at least two, at least three, at least four, at least five, at least six, at least seven or more, 2′-deoxy modification in positions 5-17, e.g., positions 6-16, positions 6-15, positions 6-14, positions 6-13, positions 6-12, positions 7-15, positions 7-14, positions 7-13, positions, 7-12, positions 8-16, positions 8-15, positions 8-14, positions 8-13, positions 8-12, positions 9-16, positions 9-15, positions 9-14, positions 9-13, positions 9-12, positions 10-16, positions 10-15, positions 10-14, positions 10-13 or positions 10-12, counting from the 5′-end of the sense strand or the antisense strand.

[0410] In some embodiments, both the sense and the antisense strands comprise at least one DNA nucleotide. The DNA nucleotide can occur on any nucleotide of the sense strand or antisense strand. For instance, the DNA nucleotide can occur on every nucleotide on the sense strand and/or antisense strand; each DNA nucleotide can occur in an alternating pattern on the sense strand or antisense strand; or the sense strand and antisense strand both comprise DNA nucleotides in an alternating pattern. The alternating pattern of the DNA nucleotides on the sense strand can be the same or different from the antisense strand, and the alternating pattern of the DNA nucleotides on the sense strand can have a shift relative to the alternating pattern of the DNA nucleotides on the antisense strand.

[0411] In some embodiments, the dsRNA comprises at least three 2′-deoxy modifications, wherein the 2′-deoxy modifications are at positions 2 and 14 of the antisense strand, counting from 5′-end of the antisense strand, and at position 11 of the sense strand, counting from 5′-end of the sense strand.

[0412] In some embodiments, the dsRNA comprises at least five 2′-deoxy modifications, wherein the 2′-deoxy modifications are at positions 2, 12 and 14 of the antisense strand, counting from 5′-end of the antisense strand, and at positions 9 and 11 of the sense strand, counting from 5′-end of the sense strand.

[0413] In some embodiments, the dsRNA comprises at least seven 2′-deoxy modifications, wherein the 2′-deoxy modifications are at positions 2, 5, 7, 12 and 14 of the antisense strand, counting from 5′-end of the antisense strand, and at positions 9 and 11 of the sense strand, counting from 5′-end of the sense strand.

[0414] In one non-limiting example, the sense strand does not comprise a 2′-deoxy nucleotide at position 11, counting from 5′-end of the sense strand.

### 2′-OMe Nucleotides

[0415] In some embodiments, the oligonucleotide or dsRNA described herein can comprise at least one, e.g., one, two, three, four, five, six, seven, eight, nine, ten, eleven, twelve, thirteen, fourteen, fifteen, sixteen, seventeen, eighteen, nineteen, twenty or more 2′-OMe nucleotides. It is noted that the 2′-OMe nucleotides all can be present in one strand of the dsRNA.

[0416] In some embodiments, the antisense strand can comprise at least one, e.g., two, three, four, five, six, seven, eight, nine, ten, eleven, twelve, thirteen, fourteen, fifteen, sixteen, seventeen or more 2′-OMe nucleotides. Without limitations, a 2′-OMe nucleotide in the antisense strand can be present at any position. In some embodiments of any one of the aspects described herein, all remaining nucleotides in the antisense strand are 2′-OMe nucleotides.

[0417] In some embodiments, the antisense strand does not comprise 2′-OMe nucleotides at least at positions 2, 14 and 16 from the 5′-end. In some other embodiments, the antisense does not comprise 2′-OMe nucleotides at least at positions 2, 6, 14 and 16 from the 5′-end. In some further embodiments, the antisense strand does not comprise 2′-OMe nucleotides at least at positions 2, 6, 9, 14 and 16 from the 5′-end. In still some further embodiments, the antisense strand does not comprise 2′-OMe nucleotides at least at positions 2, 6, 8, 9, 14 and 16 from the 5′-end.

[0418] The sense strand can comprise at least one, e.g., two, three, four, five, six, seven, eight, nine, ten, eleven, twelve, thirteen, fourteen, fifteen, sixteen or more 2′-OMe nucleotides. Without limitations, a 2′-OMe nucleotide in the sense strand can be present at any positions. In some embodiments, all remaining nucleotides in the sense strand are 2′-OMe nucleotides.

[0419] In some embodiments, the sense does not comprise 2′-OMe nucleotides at least at positions 7, 10 and 11 from the 5′-end or at positions 11, 12 and 15, counting from the 3′-end. In some other embodiments, the sense does not comprise 2′-OMe nucleotides at least at positions 7, 9, 10 and 11 from the 5′-end or at positions 11, 12 13, and 15, counting from the 3′-end.

[0420] In some embodiments, both the sense and the antisense strands comprise at least one 2′-OMe nucleotide. The 2′-OMe modification can occur on any nucleotide of the sense strand or antisense strand. For instance, the 2′-OMe modification can occur on every nucleotide on the sense strand and/or antisense strand; each thermally stabilizing modification can occur in an alternating pattern on the sense strand or antisense strand; or the sense strand and antisense strand both comprise 2′-OMe modifications in an alternating pattern. The alternating pattern of the thermally stabilizing modifications on the sense strand can be the same or different from the antisense strand, and the alternating pattern of the thermally stabilizing modifications on the sense strand can have a shift relative to the alternating pattern of the 2′-OMe modifications on the antisense strand.

### Other Modified Nucleotides

[0421] In some embodiments, the oligonucleotide or dsRNA described herein can comprise locked nucleic acid (LNA). For example, the oligonucleotide or dsRNA described herein can comprise at least one, e.g., one, two, three, four, five, six, seven, eight, nine, ten, eleven, twelve, thirteen, fourteen, fifteen, sixteen, seventeen, eighteen, nineteen, twenty or more LNA modifications. It is noted that the LNA nucleotides all can be present in one strand of the dsRNA.

[0422] In some embodiments, both the sense and the antisense strands comprise at least LNA modifications. The LNA modification can occur on any nucleotide of the sense strand or antisense strand. For instance, the LNA modification can occur on every nucleotide on the sense strand and/or antisense strand; each LNA modification can occur in an alternating pattern on the sense strand or antisense strand; or the sense strand and antisense strand both comprise LNA modifications in an alternating pattern. The alternating pattern of the LNA modifications on the sense strand can be the same or different from the antisense strand, and the alternating pattern of the LNA modifications on the sense strand can have a shift relative to the alternating pattern of the 2′-fluoro modifications on the antisense strand.

[0423] The antisense strand can comprise at least one, e.g., two, three, four, five, six, seven, eight, nine, ten or more LNA modifications. Without limitations, a LNA modification in the antisense strand can be present at any position.

[0424] The sense strand can comprise at least one, e.g., two, three, four, five, six, seven, eight, nine, ten or more LNA modifications. Without limitations, a LNA modification in the sense strand can be present at any position. In some embodiments, the sense strand comprises at least one, e.g., two, three, four, five, six, seven, eight, nine, ten or more LNA modifications and the antisense strand does not comprise a 2′-fluoro nucleotide at positions 3-9, counting from 5′-end.

[0425] The oligonucleotide or dsRNA described herein can comprise bridged nucleic acid (BNA). For example, the oligonucleotide or dsRNA described herein can comprise at least one, e.g., one, two, three, four, five, six, seven, eight, nine, ten, eleven, twelve, thirteen, fourteen, fifteen, sixteen, seventeen, eighteen, nineteen, twenty or more BNA modifications. Without limitations, the BNA nucleotides all can be present in one of the dsRNA. In some embodiments, both the sense and the antisense strands comprise at least BNA modifications. The BNA modification can occur on any nucleotide of the sense strand or antisense strand. For instance, the BNA modification can occur on every nucleotide on the sense strand and/or antisense strand; each BNA modification can occur in an alternating pattern on the sense strand or antisense strand; or the sense strand and antisense strand both comprise BNA modifications in an alternating pattern. The alternating pattern of the BNA modifications on the sense strand can be the same or different from the antisense strand, and the alternating pattern of the BNA modifications on the sense strand can have a shift relative to the alternating pattern of the 2′-fluoro modifications on the antisense strand.

[0426] The antisense strand can comprise at least one, e.g., two, three, four, five, six, seven, eight, nine, ten or more BNA modifications. Without limitations, a BNA modification in the antisense strand can be present at any position.

[0427] The sense strand can comprise at least one, e.g., two, three, four, five, six, seven, eight, nine, ten or more BNA modifications. Without limitations, a BNA modification in the sense strand can be present at any position. In some embodiments, the sense strand comprises at least one, e.g., two, three, four, five, six, seven, eight, nine, ten or more BNA modifications and the antisense strand does not comprise a 2′-fluoro nucleotide at positions 3-9, counting from 5′-end.

[0428] The oligonucleotide or dsRNA described herein can comprise cyclohexene nucleic acid (CeNA). For example, the oligonucleotide or dsRNA described herein can comprise at least one, e.g., one, two, three, four, five, six, seven, eight, nine, ten, eleven, twelve, thirteen, fourteen, fifteen, sixteen, seventeen, eighteen, nineteen, twenty or more CeNA modifications. Without limitations, the CeNA nucleotides all can be present in one strand of the dsRNA. In some embodiments, both the sense and the antisense strands comprise at least CeNA modifications. The CeNA modification can occur on any nucleotide of the sense strand or antisense strand. For instance, the CeNA modification can occur on every nucleotide on the sense strand and/or antisense strand; each CeNA modification can occur in an alternating pattern on the sense strand or antisense strand; or the sense strand and antisense strand both comprise CeNA modifications in an alternating pattern. The alternating pattern of the CeNA modifications on the sense strand can be the same or different from the antisense strand, and the alternating pattern of the CeNA modifications on the sense strand can have a shift relative to the alternating pattern of the 2′-fluoro modifications on the antisense strand.

[0429] The antisense strand can comprise at least one, e.g., two, three, four, five, six, seven, eight, nine, ten or more CeNA modifications. Without limitations, a CeNA modification in the antisense strand can be present at any position.

[0430] The sense strand can comprise at least one, e.g., two, three, four, five, six, seven, eight, nine, ten or more CeNA modifications. Without limitations, a CeNA modification in the sense strand can be present at any position. In some embodiments, the sense strand comprises at least one, e.g., two, three, four, five, six, seven, eight, nine, ten or more CeNA modifications and the antisense strand does not comprise a 2′-fluoro nucleotide at positions 3-9, counting from 5′-end.

[0431] The oligonucleotide or dsRNA described herein can comprise thermally stabilizing modifications. For example, the oligonucleotide or dsRNA described herein can comprise at least four, e.g., five, six, seven, eight, nine, ten, eleven, twelve, thirteen, fourteen, fifteen or more thermally stabilizing modifications. The thermally stabilizing modifications all can be present in one strand of the dsRNA.

[0432] In some embodiments, both the sense and the antisense strands comprise at least one, e.g., two, three, four or more thermally stabilizing modifications. The thermally stabilizing modification can occur on any nucleotide of the sense strand or antisense strand. For instance, the thermally stabilizing modification can occur on every nucleotide on the sense strand and/or antisense strand; each thermally stabilizing modification can occur in an alternating pattern on the sense strand or antisense strand; or the sense strand and antisense strand both comprise thermally stabilizing modifications in an alternating pattern. The alternating pattern of the thermally stabilizing modifications on the sense strand can be the same or different from the antisense strand, and the alternating pattern of the thermally stabilizing modifications on the sense strand can have a shift relative to the alternating pattern of the thermally stabilizing modifications on the antisense strand.

[0433] The antisense strand can comprise at least one, e.g., two, three, four, five, six, seven, eight, nine, ten or more thermally stabilizing modifications. In some embodiments, the antisense strand comprises two, three, four, five or six thermally stabilizing modifications. Without limitations, a thermally stabilizing modification in the antisense strand can be present at any position. In some embodiments, the antisense strand comprises at least three thermally stabilizing modifications. For example, the antisense strand comprises thermally stabilizing modifications at least at positions 2, 14 and 16 from the 5′-end. In some other embodiments, the antisense comprises at least four thermally stabilizing modifications. For example, the antisense comprises thermally stabilizing modifications at least at positions 2, 6, 14 and 16 from the 5′-end. In some further embodiments, the antisense strand comprises at least five thermally stabilizing modifications. For example, the antisense strand comprises thermally stabilizing modifications at least at positions 2, 6, 9, 14 and 16 from the 5′-end. In still some further embodiments, the antisense strand comprises at least six thermally stabilizing modifications. For example, the antisense strand comprises thermally stabilizing modifications at least at positions 2, 6, 8, 9, 14 and 16 from the 5′-end.

[0434] The sense strand can comprise at least one, e.g., two, three, four, five, six, seven, eight, nine, ten or more thermally stabilizing modifications. In some embodiments, the sense strand comprises two, three, four, or five thermally stabilizing modifications. For example, the sense strand comprises three or four thermally stabilizing modifications. Without limitations, a thermally stabilizing modification in the sense strand can be present at any positions. In some embodiments, the sense strand comprises at least three thermally stabilizing modifications. For example, the sense comprises thermally stabilizing modification at least at positions 7, 10 and 11 from the 5′-end. In some other embodiments, the sense strand comprises at least four thermally stabilizing modifications. For example, the sense comprises thermally stabilizing modification at least at positions 7, 9, 10 and 11 from the 5′-end.

[0435] In some embodiments, the sense strand comprises thermally stabilizing modifications at positions opposite or complimentary to positions 11, 12 and 15 of the antisense strand, counting from the 5′-end of the antisense strand. In some other embodiments, the sense strand comprises thermally stabilizing modifications at positions opposite or complimentary to positions 11, 12, 13 and 15 of the antisense strand, counting from the 5′-end of the antisense strand. In some embodiments, the sense strand comprises a block of two, three or four thermally stabilizing modification.

[0436] In some embodiments, the sense strand comprises thermally stabilizing modifications at least at positions 7, 9, and 11 from the 5′-end, and the antisense strand comprises thermally stabilizing modifications at least at positions 2, 14 and 16 from the 5′-end. In some other embodiments, the sense strand comprises thermally stabilizing modifications at least at positions 7, 9, and 11 from the 5′-end, and the antisense strand comprises thermally stabilizing modifications at least at positions 2, 6, 9, 14 and 16 from the 5′-end. In yet some other embodiments, the sense strand comprises thermally stabilizing modifications at least at positions 7, 9, and 11 from the 5′-end, and the antisense strand comprises thermally stabilizing modifications at least at positions 2, 6, 8, 9, 14 and 16 from the 5′-end.

[0437] In some embodiments, the sense strand comprises thermally stabilizing modifications at least at positions 7, 9, 10, and 11 from the 5′-end, and the antisense strand comprises thermally stabilizing modifications at least at positions 2, 14 and 16 from the 5′-end. In some other embodiments, the sense strand comprises thermally stabilizing modifications at least at positions 7, 9, 10, and 11 from the 5′-end, and the antisense strand comprises thermally stabilizing modifications at least at positions 2, 6, 9, 14 and 16 from the 5′-end. In yet some other embodiments, the sense strand comprises thermally stabilizing modifications at least at positions 7, 9, 10, and 11 from the 5′-end, and the antisense strand comprises thermally stabilizing modifications at least at positions 2, 6, 8, 9, 14 and 16 from the 5′-end.

[0438] In some embodiments, the sense strand does not comprise a thermally stabilizing modification in a position opposite or complimentary to the thermally destabilizing modification of the duplex in the antisense strand.

[0439] Exemplary thermally stabilizing modifications include, but are not limited to, 2′-fluoro modifications and locked nucleic acid (LNA).

### Internucleoside Linkages

[0440] As used herein, “internucleoside linkage” refers to a covalent linkage between adjacent nucleosides. The two main classes of internucleoside linkages are defined by the presence or absence of a phosphorus atom. Representative phosphorus containing linkages include, but are not limited to, phosphodiesters (P═O), phosphotriesters, methylphosphonates, phosphoramidate, and phosphorothioates (P═S). Representative non-phosphorus containing linking groups include, but are not limited to, methylenemethylimino (—CH₂—N(CH₃)—O—CH₂—), thiodiester (—O—C(O)—S—), thionocarbamate (—O—C(O)(NH)—S—); siloxane (—O—Si(H)₂—O—); and N,N′-dimethylhydrazine (—CH₂—N(CH₃)—N(CH₃)—). Modified internucleoside linkages, compared to natural phosphodiester linkages, can be used to alter, typically increase, nuclease resistance of the oligonucleotide compound. In certain embodiments, linkages having a chiral atom can be prepared as racemic mixtures, as separate enantiomers. Representative chiral linkages include, but are not limited to, alkylphosphonates and phosphorothioates. Methods of preparation of phosphorous-containing and non-phosphorous-containing linkages are well known to those skilled in the art.

[0441] The phosphate group in the internucleoside linkage can be modified by replacing one of the oxygens with a different substituent. One result of this modification can be increased resistance of the oligonucleotide to nucleolytic breakdown. Examples of modified phosphate groups include phosphorothioate, phosphoroselenates, borano phosphates, borano phosphate esters, hydrogen phosphonates, phosphoroamidates, alkyl or aryl phosphonates and phosphotriesters. In some embodiments, one of the non-bridging phosphate oxygen atoms in the phosphodiester internucleoside linkage can be replaced by any of the following: S, Se, BR3 (R is hydrogen, alkyl, aryl), C (i.e. an alkyl group, an aryl group, etc.,), H, NR₂ (R is hydrogen, optionally substituted alkyl, aryl), or OR (R is optionally substituted alkyl or aryl). The phosphorous atom in an unmodified phosphate group is achiral. However, replacement of one of the non-bridging oxygens with one of the above atoms or groups of atoms renders the phosphorous atom chiral. In other words a phosphorous atom in a phosphate group modified in this way is a stereogenic center. The stereogenic phosphorous atom can possess either the “R” configuration (herein Rp) or the “S” configuration (herein Sp).

[0442] Phosphorodithioates have both non-bridging oxygens replaced by sulfur. The phosphorus center in the phosphorodithioates is achiral which precludes the formation of oligonucleotides diastereomers. Thus, while not wishing to be bound by theory, modifications to both non-bridging oxygens, which eliminate the chiral center, e.g. phosphorodithioate formation, can be desirable in that they cannot produce diastereomer mixtures. The non-bridging oxygens can be independently any one of O, S, Se, B, C, H, N, or OR (R is alkyl or aryl).

[0443] A phosphodiester internucleoside linkage can also be modified by replacement of bridging oxygen, (i.e. oxygen that links the phosphate to the sugar of the nucleosides), with nitrogen (bridged phosphoroamidates), sulfur (bridged phosphorothioates) and carbon (bridged methylenephosphonates). The replacement can occur at the either one of the linking oxygens or at both linking oxygens. When the bridging oxygen is the 3′-oxygen of a nucleoside, replacement with carbon is preferred. When the bridging oxygen is the 5′-oxygen of a nucleoside, replacement with nitrogen is preferred.

[0444] Modified phosphate linkages where at least one of the oxygen linked to the phosphate has been replaced or the phosphate group has been replaced by a non-phosphorous group, are also referred to as “non-phosphodiester intersugar linkage” or “non-phosphodiester linker.”

[0445] In certain embodiments, the phosphate group can be replaced by non-phosphorus containing connectors, e.g. dephospho linkers. Dephospho linkers are also referred to as non-phosphodiester linkers herein. While not wishing to be bound by theory, it is believed that since the charged phosphodiester group is the reaction center in nucleolytic degradation, its replacement with neutral structural mimics should impart enhanced nuclease stability. Again, while not wishing to be bound by theory, it can be desirable, in some embodiment, to introduce alterations in which the charged phosphate group is replaced by a neutral moiety.

[0446] Examples of moieties which can replace the phosphate group include, but are not limited to, amides (for example amide-3 (3′-CH₂—C(═O)—N(H)-5′) and amide-4 (3′-CH₂—N(H)—C(═O)-5′)), hydroxylamino, siloxane (dialkylsiloxane), carboxamide, carbonate, carboxymethyl, carbamate, carboxylate ester, thioether, ethylene oxide linker, sulfide, sulfonate, sulfonamide, sulfonate ester, thioformacetal (3′-S—CH₂—O-5′), formacetal (3 ‘—O—CH₂—O-5’), oxime, methyleneimino, methykenecarbonylamino, methylenemethylimino (MMI, 3′-CH₂—N(CH₃)—O-5′), methylenehydrazo, methylenedimethylhydrazo, methyleneoxymethylimino, ethers (C3′—O—C5′), thioethers (C3′—S—C5′), thioacetamido (C3′—N(H)—C(═O)—CH₂—S—C5′, C3′—O—P(O)—O—SS—C5′, C3′—CH₂—NH—NH—C5′, 3′—NHP(O)(OCH₃)—O-5′ and 3′-NHP(O)(OCH₃)—O-5′ and nonionic linkages containing mixed N, O, S and CH₂ component parts. See for example, Carbohydrate Modifications in Antisense Research; Y. S. Sanghvi and P.D. Cook Eds. ACS Symposium Series 580; Chapters 3 and 4, (pp. 40-65). Preferred embodiments include methylenemethylimino (MMI), methylenecarbonylamino, amides, carbamate and ethylene oxide linker.

[0447] One skilled in the art is well aware that in certain instances replacement of a non-bridging oxygen can lead to enhanced cleavage of the intersugar linkage by the neighboring 2′-OH, thus in many instances, a modification of a non-bridging oxygen can necessitate modification of 2′-OH, e.g., a modification that does not participate in cleavage of the neighboring intersugar linkage, e.g., arabinose sugar, 2′-O-alkyl, 2′-F, LNA and ENA.

[0448] Preferred non-phosphodiester internucleoside linkages include phosphorothioates, phosphorothioates with an at least 1%, 5%, 10%, 20%, 30%, 40%, 50%, 60%, 70%, 80%, 90% 95% or more enantiomeric excess of Sp isomer, phosphorothioates with an at least 1%, 5%, 10%, 20%, 30%, 40%, 50%, 60%, 70%, 80%, 90% 95% or more enantiomeric excess of Rp isomer, phosphorodithioates, phsophotriesters, aminoalkylphosphotrioesters, alkyl-phosphonaters (e.g., methyl-phosphonate), selenophosphates, phosphoramidates (e.g., N-alkylphosphoramidate), and boranophosphonates.

[0449] Additional exemplary non-phosphorus containing internucleoside linking groups are described in U.S. Pat. Nos. 5,034,506; 5,166,315; 5,185,444; 5,214,134; 5,216,141; 5,235,033; 5,264,562; 5,264,564; 5,405,938; 5,434,257; 5,466,677; 5,470,967; 5,489,677; 5,541,307; 5,561,225; 5,596,086; 5,602,240; 5,610,289; 5,602,240; 5,608,046; 5,610,289; 5,618,704; 5,623,070; 5,663,312; 5,633,360; 5,677,437; 5,792,608; 5,646,269 and 5,677,439, content of each of which is incorporated herein by reference.

[0450] In some embodiments of any one of the aspects, the antisense and/or the sense strand comprises one or more neutral internucleoside linkages that are non-ionic. Suitable neutral internucleoside linkages include, but are not limited to, phosphotriesters, methylphosphonates, MMI (3′-CH₂—N(CH₃)—O-5′), amide-3 (3′-CH₂—C(═O)—N(H)-5′), amide-4 (3′-CH₂—N(H)—C(═O)-5′), formacetal (3 ‘—O—CH₂—O-5’), and thioformacetal (3′-S—CH₂—O-5′); nonionic linkages containing siloxane (dialkylsiloxane), carboxylate ester, carboxamide, sulfide, sulfonate ester and/or amides (See for example: Carbohydrate Modifications in Antisense Research; Y. S. Sanghvi and P.D. Cook Eds. ACS Symposium Series 580; Chapters 3 and 4, (pp. 40-65)); and nonionic linkages containing mixed N, O, S and CH₂ component parts.

[0451] In some embodiments, the non-phosphodiester backbone linkage is selected from the group consisting of phosphorothioate, phosphorodithioate, alkyl-phosphonate and phosphoramidate backbone linkages.

[0452] In some embodiments of any one of the aspects described herein, the internucleoside

[chemical structure]

[0453] linkage is where R^{IL1} and R^{IL2} are each independently for each occurrence absent, O, S, CH₂, NR (R is hydrogen, alkyl, aryl), or optionally substituted alkylene, wherein backbone of the alkylene can comprise one or more of O, S, SS and NR (R is hydrogen, alkyl, aryl) internally and/or at the end; and R^{IL3} and R^{IL4} are each independently selected from the group consisting of O, OR (R is hydrogen, alkyl, aryl), S, Se, BR3 (R is hydrogen, alkyl, aryl), BH3, C (i.e. an alkyl group, an aryl group, etc.,), H, NR₂ (R is hydrogen, alkyl, aryl), alkyl or aryl. It is understood that one of R^{IL1} and R^{IL2} is replacing the oxygen linked to 5′ carbon of a first nucleoside sugar and the other of R^{IL1} and R^{IL2} is replacing the oxygen linked to 3′ (or 2′) carbon of a second nucleoside sugar.

[0454] In some embodiments of any one of the aspects, R^{IL1}, R^{IL2}, R^{IL3} and R^{IL4} all are O.

[0455] In some embodiments, R^{IL1} and R^{IL2} are O and at least one of R^{IL3} and R^{IL4} is other than O. For example, one of R^{IL3} and R^{IL4} is S and the other is O or both of R^{IL3} and R^{IL4} are S.

[0456] In some embodiments of any one of the aspects described herein, R²³ is a bond to a modified internucleoside linkage, e.g., an internucleoside linkage of structure:

[chemical structure]

[0457] where at least one of RIL1, R^{IL2}, R^{IL3} and R^{IL4} is not O. For example, at least one of R^{IL3} and R^{IL4} is S.

[0458] In some embodiments of any one of the aspects described herein, R²³ or R²² is a bond to a phosphorothioate internucleoside linkage, e.g., an internucleoside linkage of structure:

[chemical structure]

[0459] where at least one of R^{IL1} and R^{IL2} are O; one of R^{IL3} and R^{IL4} is O and the other of R^{IL3} and R^{IL4} is S.

[0460] In some embodiments of any one of the aspects described herein, R²³ or R²² is a bond to phosphodiester internucleoside linkage, e.g., an internucleoside linkage of structure:

[chemical structure]

[0461] where R^{IL1}, R^{IL2}, R^{IL3} and R^{IL4} are O.

[0462] In some embodiments of any one of the aspects, the antisense and/or the sense strand can comprise one or more, e.g., 1, 2, 3, 4, 5, 6, 7, 8 or more modified internucleoside linkages. For example, the antisense and/or the sense strand can comprise 1, 2, 3, 4, 5 or 6 modified internucleoside linkages. For example, the antisense and/or the sense strand comprises 1, 2, 3 or 4 modified internucleoside linkages. In some embodiments, the antisense and/or the sense strand comprises at least two modified internucleoside linkages between the first five nucleotides counting from the 5′-end of the strand and further comprises at least two modified internucleoside linkages between the first five nucleotides counting from the 3′-end of the strand. For example, the antisense and/or the sense strand comprises modified internucleoside linkages between nucleotides 1 and 2, and between nucleotides 2 and 3, counting from 5′-end of the strand, and between nucleotides 1 and 2, and between nucleotides 2 and 3, counting from 3′-end of the strand.

[0463] In some embodiments of any one of the aspects, the modified internucleoside linkage is a phosphorothioate. Accordingly, in some embodiments of any one of the aspects, the antisense and/or the sense strand comprises one or more, e.g., 1, 2, 3, 4, 5, 6, 7, 8 or more phosphorothioate internucleoside linkages. For example, the antisense and/or the sense strand comprises 1, 2, 3, 4, 5 or 6 phosphorothioate internucleoside linkages. For example, the antisense and/or the sense strand comprises 1, 2, 3 or 4 phosphorothioate internucleoside linkages. In some embodiments, the antisense and/or the sense strand comprises at least two phosphorothioate internucleoside linkages between the first five nucleotides counting from the 5′-end of the strand and further comprises at least two phosphorothioate internucleoside linkages between the first five nucleotides counting from the 3′-end of the strand. For example, the antisense and/or the sense strand comprises modified internucleoside linkages between nucleotides 1 and 2, and between nucleotides 2 and 3, counting from 5′-end of the strand, and between nucleotides 1 and 2, and between nucleotides 2 and 3, counting from 3′-end of the strand.

### Phosphorothioates

[0464] The oligonucleotide or dsRNA described herein can comprise at least one, e.g., two, three, four, five, six, seven, eight, nine, ten or more phosphorothioate or methylphosphonate internucleotide linkage. The phosphorothioate or methylphosphonate internucleotide linkage modification can occur on any nucleotide of the oligonucleotide or dsRNA described herein.

[0465] In the dsRNA, the phosphorothioate or methylphosphonate internucleotide linkage modification can occur in the sense strand or antisense strand or both in any position of the strand. For instance, the internucleotide linkage modification can occur on every nucleotide on the sense strand and/or antisense strand; each internucleotide linkage modification can occur in an alternating pattern on the sense strand or antisense strand; or the sense strand or antisense strand comprises both internucleotide linkage modifications in an alternating pattern. The alternating pattern of the internucleotide linkage modification on the sense strand can be the same or different from the antisense strand, and the alternating pattern of the internucleotide linkage modification on the sense strand can have a shift relative to the alternating pattern of the internucleotide linkage modification on the antisense strand.

[0466] In some embodiments, the dsRNA comprises the phosphorothioate or methylphosphonate internucleotide linkage modification in the overhang region. For example, the overhang region comprises two nucleotides having a phosphorothioate or methylphosphonate internucleotide linkage between the two nucleotides. Internucleotide linkage modifications also may be made to link the overhang nucleotides with the terminal paired nucleotides within duplex region. For example, at least 2, 3, 4, or all the overhang nucleotides can be linked through phosphorothioate or methylphosphonate internucleotide linkage, and optionally, there may be additional phosphorothioate or methylphosphonate internucleotide linkages linking the overhang nucleotide with a paired nucleotide that is next to the overhang nucleotide. For instance, there may be at least two phosphorothioate internucleotide linkages between the terminal three nucleotides, in which two of the three nucleotides are overhang nucleotides, and the third is a paired nucleotide next to the overhang nucleotide. Preferably, these terminal three nucleotides can be at the 3′-end of the antisense strand.

[0467] In some embodiments, the sense strand comprises 1-10 blocks of two to ten phosphorothioate or methylphosphonate internucleotide linkages separated by 1, 2, 3, 4, 5, 6, 7, 8, 9, 10, 11, 12, 13, 14, 15 or 16 phosphate internucleotide linkages, wherein one of the phosphorothioate or methylphosphonate internucleotide linkages is placed at any position in the sense strand and the said sense strand is paired with an antisense strand comprising any combination of phosphorothioate, methylphosphonate and phosphate internucleotide linkages or an antisense strand comprising either phosphorothioate or methylphosphonate or phosphate linkage.

[0468] In some embodiments, the antisense strand comprises two blocks of two phosphorothioate or methylphosphonate internucleotide linkages separated by 1, 2, 3, 4, 5, 6, 7, 8, 9, 10, 11, 12, 13, 14, 15, 16, 17, or 18 phosphate internucleotide linkages, wherein one of the phosphorothioate or methylphosphonate internucleotide linkages is placed at any position in the antisense strand and the said antisense strand is paired with a sense strand comprising any combination of phosphorothioate, methylphosphonate and phosphate internucleotide linkages or an antisense strand comprising either phosphorothioate or methylphosphonate or phosphate linkage.

[0469] In some embodiments, the antisense strand comprises two blocks of three phosphorothioate or methylphosphonate internucleotide linkages separated by 1, 2, 3, 4, 5, 6, 7, 8, 9, 10, 11, 12, 13, 14, 15 or 16 phosphate internucleotide linkages, wherein one of the phosphorothioate or methylphosphonate internucleotide linkages is placed at any position in antisense strand and the said antisense strand is paired with a sense strand comprising any combination of phosphorothioate, methylphosphonate and phosphate internucleotide linkages or an antisense strand comprising either phosphorothioate or methylphosphonate or phosphate linkage.

[0470] In some embodiments, the antisense strand comprises two blocks of four phosphorothioate or methylphosphonate internucleotide linkages separated by 1, 2, 3, 4, 5, 6, 7, 8, 9, 10, 11, 12, 13 or 14 phosphate internucleotide linkages, wherein one of the phosphorothioate or methylphosphonate internucleotide linkages is placed at any position in the antisense strand and the said antisense strand is paired with a sense strand comprising any combination of phosphorothioate, methylphosphonate and phosphate internucleotide linkages or an antisense strand comprising either phosphorothioate or methylphosphonate or phosphate linkage.

[0471] In some embodiments, the antisense strand comprises two blocks of five phosphorothioate or methylphosphonate internucleotide linkages separated by 1, 2, 3, 4, 5, 6, 7, 8, 9, 10, 11 or 12 phosphate internucleotide linkages, wherein one of the phosphorothioate or methylphosphonate internucleotide linkages is placed at any position in the antisense strand and the said antisense strand is paired with a sense strand comprising any combination of phosphorothioate, methylphosphonate and phosphate internucleotide linkages or an antisense strand comprising either phosphorothioate or methylphosphonate or phosphate linkage.

[0472] In some embodiments, the antisense strand comprises two blocks of six phosphorothioate or methylphosphonate internucleotide linkages separated by 1, 2, 3, 4, 5, 6, 7, 8, 9 or 10 phosphate internucleotide linkages, wherein one of the phosphorothioate or methylphosphonate internucleotide linkages is placed at any position in the antisense strand and the said antisense strand is paired with a sense strand comprising any combination of phosphorothioate, methylphosphonate and phosphate internucleotide linkages or an antisense strand comprising either phosphorothioate or methylphosphonate or phosphate linkage.

[0473] In some embodiments, the antisense strand comprises two blocks of seven phosphorothioate or methylphosphonate internucleotide linkages separated by 1, 2, 3, 4, 5, 6, 7 or 8 phosphate internucleotide linkages, wherein one of the phosphorothioate or methylphosphonate internucleotide linkages is placed at any position in the antisense strand and the said antisense strand is paired with a sense strand comprising any combination of phosphorothioate, methylphosphonate and phosphate internucleotide linkages or an antisense strand comprising either phosphorothioate or methylphosphonate or phosphate linkage.

[0474] In some embodiments, the antisense strand comprises two blocks of eight phosphorothioate or methylphosphonate internucleotide linkages separated by 1, 2, 3, 4, 5 or 6 phosphate internucleotide linkages, wherein one of the phosphorothioate or methylphosphonate internucleotide linkages is placed at any position in the antisense strand and the said antisense strand is paired with a sense strand comprising any combination of phosphorothioate, methylphosphonate and phosphate internucleotide linkages or an antisense strand comprising either phosphorothioate or methylphosphonate or phosphate linkage.

[0475] In some embodiments, the antisense strand comprises two blocks of nine phosphorothioate or methylphosphonate internucleotide linkages separated by 1, 2, 3 or 4 phosphate internucleotide linkages, wherein one of the phosphorothioate or methylphosphonate internucleotide linkages is placed at any position in antisense strand sequence and the said antisense strand is paired with a sense strand comprising any combination of phosphorothioate, methylphosphonate and phosphate internucleotide linkages or an antisense strand comprising either phosphorothioate or methylphosphonate or phosphate linkage.

[0476] In some embodiments, the dsRNA comprises one or more phosphorothioate or methylphosphonate internucleotide linkage modification within 1-10 of the termini position(s) of the sense and/or antisense strand. For example, at least 2, 3, 4, 5, 6, 7, 8, 9 or 10 nucleotides may be linked through phosphorothioate or methylphosphonate internucleotide linkage at one end or both ends of the sense and/or antisense strand.

[0477] In some embodiments, the dsRNA comprises one or more phosphorothioate or methylphosphonate internucleotide linkage modification within 1-10 of the internal region of the duplex of each of the sense and/or antisense strand. For example, at least 2, 3, 4, 5, 6, 7, 8, 9 or 10 nucleotides may be linked through phosphorothioate methylphosphonate internucleotide linkage at position 8-16 of the duplex region counting from the 5′-end of the sense strand; dsRNA can optionally further comprise one or more phosphorothioate or methylphosphonate internucleotide linkage modification within 1-10 of the termini position(s).

[0478] In some embodiments, the dsRNA comprises one to five phosphorothioate or methylphosphonate internucleotide linkage modification(s) within position 1-5 (counting from the 5′-end) and one to five phosphorothioate or methylphosphonate internucleotide linkage modification(s) within position 1-5 (counting from the 3′-end) of the sense strand, and one to five phosphorothioate or methylphosphonate internucleotide linkage modification at positions 1 and 2 (counting from the 5′-end) and one to five within positions 1-5 (counting from the 3′-end) of the antisense strand.

[0479] In some embodiments, the dsRNA comprises one phosphorothioate internucleotide linkage modification within position 1-5 (counting from the 5′-end) and one phosphorothioate or methylphosphonate internucleotide linkage modification within position 1-5 (counting from the 3′-end) of the sense strand, and one phosphorothioate internucleotide linkage modification at positions 1 and 2 (counting from the 5′-end) and two phosphorothioate or methylphosphonate internucleotide linkage modifications within positions 1-5 (counting from the 3′-end) of the antisense strand.

[0480] In some embodiments, the dsRNA comprises two phosphorothioate internucleotide linkage modifications within position 1-5 (counting from the 5′-end) and one phosphorothioate internucleotide linkage modification within position 1-5 (counting from the 3′-end) of the sense strand, and one phosphorothioate internucleotide linkage modification at positions 1 and 2 (counting from the 5′-end) and two phosphorothioate internucleotide linkage modifications within positions 18-23 (counting from the 3′-end) of the antisense strand.

[0481] In some embodiments, the dsRNA comprises two phosphorothioate internucleotide linkage modifications within position 1-5 (counting from the 5′-end) and two phosphorothioate internucleotide linkage modifications within position 1-5 (counting from the 3′-end) of the sense strand, and one phosphorothioate internucleotide linkage modification at positions 1 and 2 (counting from the 5′-end) and two phosphorothioate internucleotide linkage modifications within positions 1-5 (counting from the 3′-end) of the antisense strand.

[0482] In some embodiments, the dsRNA comprises two phosphorothioate internucleotide linkage modifications within position 1-5 (counting from the 5′-end) and two phosphorothioate internucleotide linkage modifications within position 1-5 (counting from the 3′-end) of the sense strand, and one phosphorothioate internucleotide linkage modification at positions 1 and 2 (counting from the 5′-end) and one phosphorothioate internucleotide linkage modification within positions 1-5 (counting from the 3′-end) of the antisense strand.

[0483] In some embodiments, the dsRNA comprises one phosphorothioate internucleotide linkage modification within position 1-5 (counting from the 5′-end) and one phosphorothioate internucleotide linkage modification within position 1-5 (counting from the 3′-end) of the sense strand, and two phosphorothioate internucleotide linkage modifications at positions 1 and 2 (counting from the 5′-end) and two phosphorothioate internucleotide linkage modifications within positions 1-5 (counting from the 3′-end) of the antisense strand.

[0484] In some embodiments, the dsRNA comprises one phosphorothioate internucleotide linkage modification within position 1-5 (counting from the 5′-end) and one within position 1-5 (counting from the 3′-end) of the sense strand, and two phosphorothioate internucleotide linkage modification at positions 1 and 2 (counting from the 5′-end) and one phosphorothioate internucleotide linkage modification within positions 1-5 (counting from the 3′-end) of the antisense strand.

[0485] In some embodiments, the dsRNA comprises one phosphorothioate internucleotide linkage modification within position 1-5 (counting from the 5′-end) of the sense strand, and two phosphorothioate internucleotide linkage modifications at positions 1 and 2 (counting from the 5′-end) and one phosphorothioate internucleotide linkage modification within positions 1-5 (counting from the 3′-end) of the antisense strand.

[0486] In some embodiments, the dsRNA comprises two phosphorothioate internucleotide linkage modifications within position 1-5 (counting from the 5′-end) of the sense strand, and one phosphorothioate internucleotide linkage modification at positions 1 and 2 (counting from the 5′-end) and two phosphorothioate internucleotide linkage modifications within positions 1-5 (counting from the 3′-end) of the antisense strand.

[0487] In some embodiments, the dsRNA comprises two phosphorothioate internucleotide linkage modifications within position 1-5 (counting from the 5′-end) and one within position 1-5 (counting from the 3′-end) of the sense strand, and two phosphorothioate internucleotide linkage modifications at positions 1 and 2 (counting from the 5′-end) and one phosphorothioate internucleotide linkage modification within positions 1-5 (counting from the 3′-end) of the antisense strand.

[0488] In some embodiments, the dsRNA comprises two phosphorothioate internucleotide linkage modifications within position 1-5 (counting from the 5′-end) and one phosphorothioate internucleotide linkage modification within position 1-5 (counting from the 3′-end) of the sense strand, and two phosphorothioate internucleotide linkage modifications at positions 1 and 2 (counting from the 5′-end) and two phosphorothioate internucleotide linkage modifications within positions 1-5 (counting from the 3′-end) of the antisense strand.

[0489] In some embodiments, the dsRNA comprises two phosphorothioate internucleotide linkage modifications within position 1-5 (counting from the 5′-end) and one phosphorothioate internucleotide linkage modification within position 1-5 (counting from the 3′-end) of the sense strand, and one phosphorothioate internucleotide linkage modification at positions 1 and 2 (counting from the 5′-end) and two phosphorothioate internucleotide linkage modifications within positions 1-5 (counting from the 3′-end) of the antisense strand.

[0490] In some embodiments, the dsRNA comprises two phosphorothioate internucleotide linkage modifications at position 1 and 2 (counting from the 5′-end), and two phosphorothioate internucleotide linkage modifications at position 1 and 2 (counting from the 3′-end) of the sense strand (counting from the 5′-end), and one phosphorothioate internucleotide linkage modification at positions 1 (counting from the 5′-end) and one at position 1 or 2 (counting from the 3′-end) of the antisense strand.

[0491] In some embodiments, the dsRNA comprises one phosphorothioate internucleotide linkage modification at position 1 (counting from the 5′-end), and one phosphorothioate internucleotide linkage modification at position 1 (counting from the 3′-end) of the sense strand, and two phosphorothioate internucleotide linkage modifications at positions 1 and 2 (counting from the 5′-end) and two phosphorothioate internucleotide linkage modifications at positions 1 and 2 (counting from the 3′-end) the antisense strand.

[0492] In some embodiments, the dsRNA comprises two phosphorothioate internucleotide linkage modifications at position 1 and 2 (counting from the 5′-end), and two phosphorothioate internucleotide linkage modifications at position 1 and 2 (counting from the 3′-end) of the sense strand, and one phosphorothioate internucleotide linkage modification at positions 1 (counting from the 5′-end) and one phosphorothioate internucleotide linkage modification at position 1 (counting from the 3′-end) of the antisense strand.

[0493] In some embodiments, the dsRNA comprises one phosphorothioate internucleotide linkage modification at position 1 (counting from the 5′-end), and one phosphorothioate internucleotide linkage modification at position 1 (counting from the 3′-end) of the sense strand, and two phosphorothioate internucleotide linkage modifications at positions 1 and 2 (counting from the 5′-end) and two phosphorothioate internucleotide linkage modifications at positions 1 and 2 (counting from the 5′-end) the antisense strand.

[0494] In some embodiments, the dsRNA comprises two phosphorothioate internucleotide linkage modifications at position 1 and 2 (counting from the 5′-end), and two phosphorothioate internucleotide linkage modifications at position 1 and 2 (counting from the 3′-end) of the sense strand, and one phosphorothioate internucleotide linkage modification at positions 1 (counting from the 5′-end) and one phosphorothioate internucleotide linkage modification at position 1 (counting from the 3′-end) of the antisense strand.

[0495] In some embodiments, the dsRNA one phosphorothioate internucleotide linkage modification at position 1 (counting from the 5′-end), and one phosphorothioate internucleotide linkage modification at position 1 (counting from the 3′-end) of the sense strand, and two phosphorothioate internucleotide linkage modifications at positions 1 and 2 (counting from the 5′-end) and two phosphorothioate internucleotide linkage modifications at positions 1 and 2 (counting from the 3′-end) of the antisense strand.

[0496] In some embodiments, the sense strand can comprise 0, 1, 2, 3 or 4 phosphorothioate internucleotide linkages. For example, the sense strand comprises phosphorothioate internucleotide linkages between nucleotide positions 1 and 2, and between nucleotide positions 2 and 3 (counting from the 5′-end).

[0497] In some embodiments, the antisense strand can comprise 1, 2, 3 or 4 phosphorothioate internucleotide linkages. For example, the sense strand comprises phosphorothioate internucleotide linkages between nucleotide positions 1 and 2, and between nucleotide positions 2 and 3 (counting from the 3′-end). In an additional example, the antisense strand comprises phosphorothioate internucleotide linkages between nucleotide positions 1 and 2 (counting from the 5′-end), between nucleotide positions 2 and 3 (counting from the 5′-end), between nucleotide positions 1 and 2 (counting from the 3′-end), and between nucleotide positions 2 and 3 (counting from the 3′-end).

[0498] In some embodiments, the sense strand comprises phosphorothioate internucleotide linkages between nucleotide positions 1 and 2 (counting from the 5′-end), and between nucleotide positions 2 and 3 (counting from the 5′-end), and the antisense strand comprises phosphorothioate internucleotide linkages between nucleotide positions 1 and 2 (counting from the 3′-end), and between nucleotide positions 2 and 3 (counting from the 5′-end). For example, the sense strand comprises phosphorothioate internucleotide linkages between nucleotide positions 1 and 2 (counting from the 5′-end), and between nucleotide positions 2 and 3 (counting from the 5′-end), and the antisense strand comprises phosphorothioate internucleotide linkages between nucleotide positions 1 and 2 (counting from the 5′-end), between nucleotide positions 2 and 3 (counting from the 5′-end), between nucleotide positions 1 and 2 (counting from the 3′-end), and between nucleotide positions 2 and 3 (counting from the 5′-end).

### 5′-Modifications

[0499] In some embodiments, the dsRNA can be 5′ phosphorylated or include a phosphoryl analog at 5′ terminus of the antisense and/or sense strand. For example, the antisense strand can be 5′ phosphorylated or include a phosphoryl analog at the 5′ terminus. Exemplary 5′-phosphate modifications include those which are compatible with RISC mediated gene silencing. Suitable modifications include: 5′-monophosphate ((HO)₂(O) P—O-5′); 5′-diphosphate ((HO)₂(O) P—O—P(HO)(O)—O-5′); 5′-triphosphate ((HO)₂(O) P—O—(HO)(O) P—O—P(HO)(O)—O-5′); 5′-guanosine cap (7-methylated or non-methylated) (7m-G-O-5′-(HO)(O) P—O—(HO)(O) P—O—P(HO)(O)—O-5′); 5′-adenosine cap (Appp), and any modified or unmodified nucleotide cap structure (N—O-5′-(HO)(O) P—O—(HO)(O) P—O—P(HO)(O)—O-5′); 5′-monothiophosphate (phosphorothioate; (HO) 2 (S) P—O-5′); 5′-monodithiophosphate (phosphorodithioate; (HO)(HS)(S) P—O-5′), 5′-phosphorothiolate ((HO)₂(O) P—S-5′); any additional combination of oxygen/sulfur replaced monophosphate, diphosphate and triphosphates (e.g. 5′-alpha-thiotriphosphate, 5′-gamma-thiotriphosphate, etc.), 5′-phosphoramidates ((HO)₂(O) P—NH-5′, (HO)(NH₂)(O) P—O-5′), 5′-alkylphosphonates (R=alkyl-methyl, ethyl, isopropyl, propyl, etc., e.g. R^{P} (OH)(O)—O-5′-, 5′-alkenylphosphonates (i.e. vinyl, substituted vinyl), (OH)₂(O) P-5′-CH₂—), 5′-alkyletherphosphonates (R=alkylether-methoxymethyl (MeOCH₂—), ethoxymethyl, etc., e.g. RP(OH)(O)—O-5′-).

[0500] In some embodiments, the antisense strand comprises a 5′-vinylphosphonate nucleotide at 5′-end. For example, the antisense strand comprises a 5′-E-vinylphosphanate nucleotide at 5′-end. In some embodiments, the antisense strand comprises 5′-E-vinylphosphanate and a nucleoside at position N-1 that reduces or inhibits activity of siRNA relative to a siRNA having the same antisense strand sequence, but unmodified N-1 position.

[0501] In some embodiments, the sense strand comprises a 5′-morpholino, a 5′-dimethylamino, a 5′-deoxy, an inverted abasic, or an inverted abasic locked nucleic acid modification at the 5′-end. In some embodiments, the sense strand comprises a nucleotide of Formula (II) at its 5′-end.

[0502] In some embodiments, the antisense strand comprises a nucleotide of Formula (II-VP) or (II-VP′) on its 5′-end.

### Thermal Stability

[0503] Generally, the dsRNA has a melting temperature in the range from about 40° C. to about 80° C. For example, the dsRNA has a melting temperature with a lower end of the range from about 40° C., 45° C., 50° C., 55° C., 60° C. or 65° C., and upper end of the range from about 70° C., 75° C. or 80° C. In some embodiments, the dsRNA has a melting temperature in the range from about 55° C. to about 70° C. or in the range from about 60° C. to about 75° C. In some embodiments, the dsRNA has a melting temperature in the range from about 57° C. to about 67° C. In some particular embodiments, the dsRNA has a melting temperature in the range from about 60° C. to about 67° C. In some additional embodiments, the dsRNA has a melting temperature in the range from about 62° C. to about 66° C.

[0504] Without wishing to be bound by a theory, thermally destabilizing modifications in the seed region of the antisense strand (i.e., at positions 2-9 from the 5′-end or positions 23-30 from the 3′-end of the antisense strand) can reduce or inhibit off-target gene silencing. Accordingly, the oligonucleotide or the dsRNA described herein can comprise at least one (e.g., one, two, three, four, five or more) thermally destabilizing modifications. In some embodiments, the antisense strand comprises at least one (e.g., one, two, three, four, five or more) thermally destabilizing modification of the duplex within the first 9 nucleotide positions of the 5′-end or nucleotide positions 23-31 from of the 3′-end of the antisense strand.

[0505] The term “thermally destabilizing modification(s)” includes modification(s) that would result with a dsRNA with a lower overall melting temperature (Tm) (preferably a Tm with one, two, three or four degrees lower than the Tm of the dsRNA without having such modification(s).

[0506] In some embodiments, thermally destabilizing modification is located at position 2, 3, 4, 5, 6, 7, 8 or 9, or preferably at position 4, 5, 6, 7, or 8, from the 5′-end of the antisense strand. In some embodiments, the thermally destabilizing modification is located at position 2, 3, 4, 5 or 9 from the 5′-end of the antisense strand. In some other embodiments, the thermally destabilizing modification is located at position 6, 7 or 8 from the 5′-end of the antisense strand. In some particular embodiments, the thermally destabilizing modification is located at position 7 from the 5′-end of the antisense strand.

[0507] The thermally destabilizing modifications can include, but are not limited to, abasic nucleosides; mismatch with the opposing nucleotide in the opposing strand; and nucleosides with modified sugars, such as 2′-deoxy nucleosides or acyclic nucleosides, e.g., unlocked nucleic acids (UNA) or glycol nucleic acid (GNA).

[0508] Exemplary abasic modifications include, but are not limited to, the following:

[chemical structure]

[0509] wherein R is H, Me, Et or OMe; R′ is H, Me, Et or OMe; R″ is H, Me, Et or OMe; and * represents either R, S or racemic.

[0510] Exemplary destabilizing sugar modifications include, but are not limited to the following:

[chemical structure]

[chemical structure]

(TNA)

[chemical structure]

e.g., R = OH, F, OMe
2′-5′-linked (3′RNA)

[chemical structure]

Me/F Gem

[chemical structure]

e.g., R = OH, F, OMe
L-nucleotide

[0511] wherein B is a modified or unmodified nucleobase.

[0512] Additional sugar modifications include, but are not limited to the following:

[chemical structure]

2′-deoxy

[chemical structure]

unlocked nucleic acid
R = H, OH, O-alkyl

[chemical structure]

glycol nucleic acid
R = H, OH, O-alkyl

[chemical structure]

glycol nucleic acid
R = H, OH, O-alkyl

[chemical structure]

unlocked nucleic acid
R = H, OH, CH₃, CH₂CH₃, O-alkyl,
NH₂, NHMe, NMe₂
R′ = H, OH, CH₃, CH₂CH₃, O-alkyl,
NH₂, NHMe, NMe₂
R″ = H, OH, CH₃, CH₂CH₃, O-alkyl,
NH₂, NHMe, NMe₂
R′′′ = H, OH, CH₃, CH₂CH₃, O-alkyl,
NH₂, NHMe, NMe₂
R″″ = H, OH, CH₃, CH₂CH₃, O-alkyl,
NH₂, NHMe, NMe₂

[chemical structure]

[chemical structure]

R = H, methyl, ethyl

[0513] wherein B is a modified or unmodified nucleobase.

[0514] In some embodiments the thermally destabilizing modification is selected from the group consisting of:

[chemical structure]

[0515] wherein B is a modified or unmodified nucleobase and the asterisk on each structure represents either R, S or racemic.

[0516] The term “acyclic nucleotide” refers to any nucleotide having an acyclic ribose sugar, for example, where any of bonds between the ribose carbons (e.g., C1′-C2′, C2′-C3′, C3′-C4′, C4′-O4′, or C1′-O4′) is absent and/or at least one of ribose carbons or oxygen (e.g., C1′, C2′, C3′, C4′ or O4′) are independently or in combination absent from the nucleotide. In some

[chemical structure]

[0517] embodiments, acyclic nucleotide is wherein B is a modified or unmodified nucleobase, R¹ and R² independently are H, halogen, OR³, or alkyl; and R³ is H, alkyl, cycloalkyl, aryl, aralkyl, heteroaryl or sugar). The term “UNA” refers to unlocked acyclic nucleic acid, wherein any of the bonds of the sugar has been removed, forming an unlocked “sugar” residue. In one example, UNA also encompasses monomers with bonds between C1′-C4′ being removed (i.e., the covalent carbon-oxygen-carbon bond between the C1′ and C4′ carbons). In another example, the C2′-C3′ bond (i.e., the covalent carbon-carbon bond between the C2′ and C3′ carbons) of the sugar is removed (see Mikhailov et. al., Tetrahedron Letters, 26 (17): 2059 (1985); and Fluiter et al., Mol. Biosyst., 10:1039 (2009), which are hereby incorporated by reference in their entirety). The acyclic derivative provides greater backbone flexibility without affecting the Watson-Crick pairings. The acyclic nucleotide can be linked via 2′-5′ or 3′-5′ linkage.

[0518] The term ‘GNA’ refers to glycol nucleic acid which is a polymer similar to DNA or RNA but differing in the composition of its “backbone” in that is composed of repeating glycerol units linked by phosphodiester bonds:

[chemical structure]

[0519] The thermally destabilizing modification of the duplex can be mismatches (i.e., noncomplementary base pairs) between the thermally destabilizing nucleotide and the opposing nucleotide in the opposite strand within the double-stranded region of the dsRNA. Exemplary mismatch base pairs include G:G, G:A, G:U, G:T, A:A, A:C, C:C, C:U, C:T, U:U, T:T, U:T, or a combination thereof. Other mismatch base pairings known in the art are also amenable to the present invention. A mismatch can occur between nucleotides that are either naturally occurring nucleotides or modified nucleotides, i.e., the mismatch base pairing can occur between the nucleobases from respective nucleotides independent of the modifications on the ribose sugars of the nucleotides. In certain embodiments, the dsRNA comprises at least one nucleobase in the mismatch pairing that is a 2′-deoxy nucleobase; e.g., the 2′-deoxy nucleobase is in the sense strand.

[0520] In some embodiments, the thermally destabilizing modification in the seed region of the antisense strand includes nucleotides with impaired W—C H-bonding to complementary base on the target mRNA. Exemplary, nucleotides with impaired W—C H-bonding to complementary base on the target mRNA include, but are not limited to, nucleotides comprising a nucleobase independently selected from the following:

[chemical structure]

[0521] Additional examples of abasic nucleotide, acyclic nucleotide modifications (including UNA and GNA), and mismatch modifications have been described in detail in WO 2011/133876, which is herein incorporated by reference in its entirety.

[0522] The thermally destabilizing modifications can also include a universal nucleobase with reduced or abolished capability to form hydrogen bonds with the opposing bases, and phosphate modifications.

[0523] In some embodiments, the thermally destabilizing modification includes nucleotides with non-canonical bases such as, but not limited to, nucleobase modifications with impaired or completely abolished capability to form hydrogen bonds with bases in the opposite strand. These nucleobase modifications have been evaluated for destabilization of the central region of the double-stranded region of the dsRNA as described in WO 2010/0011895, which is herein incorporated by reference in its entirety. Exemplary such nucleobase modifications are:

[chemical structure]

[0524] In some embodiments, the thermally destabilizing modification includes one or more α-nucleotides, such as:

[chemical structure]

wherein R is H, OH, OCH₃, F, NH₂, NHMe, NMe₂ or O-alkyl

[0525] Exemplary phosphate modifications known to decrease the thermal stability of double-stranded nucleic acid duplexes compared to natural phosphodiester linkages include, but are not limited to, the following:

[chemical structure]

[0526] The alkyl for the R group can be a C₁-C₆alkyl. Specific alkyls for the R group include, but are not limited to methyl, ethyl, propyl, isopropyl, butyl, pentyl and hexyl.

[0527] In some embodiments, the thermally destabilizing modifications is unlocked (UNA) or glycol nucleic acid (GNA). For example, the thermally destabilizing modifications can include, but are not limited to, mUNA and GNA building blocks as follows:

[chemical structure]

[chemical structure]

[0528] In some embodiments, the destabilizing modification is selected from the following:

[chemical structure]

[chemical structure]

[0529] In some embodiments, the destabilizing modification is selected from the following:

[chemical structure]

[0530] In some embodiments, the destabilizing modification is selected from the following:

[chemical structure]

[chemical structure]

[0531] In some embodiments, the destabilizing modification is selected from the group consisting of GNA-isoC, GNA-isoG, 5′-mUNA, 4′-mUNA, 3′-mUNA, and 2′-mUNA.

[0532] In some embodiments, the destabilizing modification mUNA is selected from the group consisting of

[chemical structure]

[0533] R═H, OH; OMe; Cl, F; OH; O—(CH₂)₂OMe; SMe, NMe₂; NH₂; Me; CCH (alkyne), O-nPr; O-alkyl; O-alkylamino;
[0534] R′═H, Me;
[0535] B=A; C; 5-Me-C; G; I; U; T; Y; 2-thiouridine; 4-thiouridine; C₅-modified pyrimidines; C₂-modified purines; N8-modiifed purines; phenoxazine; G-clamp; non-canonical mono, bi and tricyclic heterocycles; pseudouracil; isoC; isoG; 2,6-diamninopurine; pseudocytosine; 2-aminopurine; xanthosine; N6-alkyl-A; O6-alkyl-G; 2-thiouridine; 4-thiouridine; C₅-modified pyrimidines; C₂-modified purines; N8-modiifed purines; 7-deazapurines, phenoxazine; G-clamp; non-canonical mono, bi and tricyclic heterocycles; and
[0536] Stereochemistry is R or S and combination of R and S for the unspecified chiral centers.

[0537] In some embodiments, the destabilizing modification mUNA is selected from the group consisting of

[chemical structure]

[0538] R═H, OH; OMe; Cl, F; OH; O—(CH₂)₂OMe; SMe, NMe₂; NH₂; Me; CCH (alkyne), O-nPr; O-alkyl; O-alkylamino;
[0539] R′═H, Me;
[0540] B=A; C; 5-Me-C; G; I; U; T; Y; 2-thiouridine; 4-thiouridine; C₅-modified pyrimidines; C₂-modified purines; N8-modiifed purines; phenoxazine; G-clamp; non-canonical mono, bi and tricyclic heterocycles; pseudouracil; isoC; isoG; 2,6-diamninopurine; pseudocytosine; 2-aminopurine; xanthosine; N6-alkyl-A; O6-alkyl-G; 2-thiouridine; 4-thiouridine; C₅-modified pyrimidines; C₂-modified purines; N8-modiifed purines; 7-deazapurines, phenoxazine; G-clamp; non-canonical mono, bi and tricyclic heterocycles; and
[0541] Stereochemistry is R or S and combination of R and S for the unspecified chiral centers.

[0542] In some embodiments, the destabilizing modification mUNA is selected from the group consisting of

[chemical structure]

[0543] R═H, OMe; F; OH; O—(CH₂)₂OMe; SMe, NMe₂; NH₂; Me; O-nPr; O-alkyl; O-alkylamino;
[0544] R′═H, Me;
[0545] B=A; C; 5-Me-C; G; I; U; T; Y; 2-thiouridine; 4-thiouridine; C₅-modified pyrimidines; C₂-modified purines; N8-modiifed purines; phenoxazine; G-clamp; non-canonical mono, bi and tricyclic heterocycles; pseudouracil; isoC; isoG; 2,6-diamninopurine; pseudocytosine; 2-aminopurine; xanthosine; N6-alkyl-A; O6-alkyl-G; 7-deazapurines; and
[0546] Stereochemistry is R or S and combination of R and S for the unspecified chiral centers.

[0547] In some embodiments, the destabilizing modification mUNA is selected from the group consisting of

[chemical structure]

[0548] R═H, OH; OMe; Cl, F; OH; O—(CH₂)₂OMe; SMe, NMe₂; NH₂; Me; CCH (alkyne), O-nPr; O-alkyl; O-alkylamino;
[0549] R′═H, Me;
[0550] B=A; C; 5-Me-C; G; I; U; T; Y; 2-thiouridine; 4-thiouridine; C₅-modified pyrimidines; C₂-modified purines; N8-modified purines; phenoxazine; G-clamp; non-canonical mono, bi and tricyclic heterocycles; pseudouracil; isoC; isoG; 2,6-diamninopurine; pseudocytosine; 2-aminopurine; xanthosine; N6-alkyl-A; O6-alkyl-G; 2-thiouridine; 4-thiouridine; C₅-modified pyrimidines; C2-modified purines; N8-modified purines; 7-deazapurines, phenoxazine; G-clamp; non-canonical mono, bi and tricyclic heterocycles; and
[0551] Stereochemistry is R or S and combination of R and S for the unspecified chiral centers

[0552] In some embodiments, the destabilizing modification mUNA is selected from the group consisting of

[chemical structure]

[0553] R═H, OH; OMe; C₁, F; OH; O—(CH₂)₂OMe; SMe, NMe₂; NH₂; Me; CCH (alkyne), O-nPr; O-alkyl; O-alkylamino;
[0554] R′═H, Me;
[0555] B=A; C; 5-Me-C; G; I; U; T; Y; 2-thiouridine; 4-thiouridine; C₅-modified pyrimidines; C₂-modified purines; N8-modified purines; phenoxazine; G-clamp; non-canonical mono, bi and tricyclic heterocycles; pseudouracil; isoC; isoG; 2,6-diamninopurine; pseudocytosine; 2-aminopurine; xanthosine; N6-alkyl-A; O6-alkyl-G; 2-thiouridine; 4-thiouridine; C₅-modified pyrimidines; C₂-modified purines; N8-modified purines; 7-deazapurines, phenoxazine; G-clamp; non-canonical mono, bi and tricyclic heterocycles; and
[0556] Stereochemistry is R or S and combination of R and S for the unspecified chiral centers

[0557] In some embodiments, the modification mUNA is selected from the group consisting of

[chemical structure]

[0558] R═H, OMe; F; OH; O—(CH₂)₂OMe; SMe, NMe₂; NH₂; Me; O-nPr; O-alkyl; O-alkylamino;
[0559] R′═H, Me;
[0560] B=A; C; 5-Me-C; G; I; U; T; Y; 2-thiouridine; 4-thiouridine; C₅-modified pyrimidines; C₂-modified purines; N8-modified purines; phenoxazine; G-clamp; non-canonical mono, bi and tricyclic heterocycles; pseudouracil; isoC; isoG; 2,6-diamninopurine; pseudocytosine; 2-aminopurine; xanthosine; N6-alkyl-A; O6-alkyl-G; 7-deazapurines; and
[0561] Stereochemistry is R or S and combination of R and S for the unspecified chiral centers

[0562] In some embodiments, the antisense strand comprises at least two (e.g., two, three, four, five, six, seven, eight, nine, ten or more) stabilizing modifications. Without limitations, a stabilizing modification in the antisense strand can be present at any positions. In some embodiments, the antisense strand comprises stabilizing modifications at positions 2, 6, 8, 9, 14 and 16, counting from the 5′-end. In some other embodiments, the antisense strand comprises stabilizing modifications at positions 2, 6, 14 and 16, counting from the 5′-end. In still some other embodiments, the antisense strand comprises stabilizing modifications at positions 2, 14 and 16, counting from the 5′-end. In some embodiments, the antisense strand comprises stabilizing modifications at positions 7, 10 and 11, counting from the 5′-end. In some other embodiments, the antisense strand comprises stabilizing modifications at positions 7, 9, 10 and 11, counting from the 5′-end.

[0563] In some embodiments, the antisense strand comprises at least one stabilizing modification adjacent to the destabilizing modification. For example, the stabilizing modification can be the nucleotide at the 5′-end or the 3′-end of the destabilizing modification, i.e., at position −1 or +1 from the position of the destabilizing modification. In some embodiments, the antisense strand comprises a stabilizing modification at each of the 5′-end and the 3′-end of the destabilizing modification, i.e., positions-1 and +1 from the position of the destabilizing modification.

[0564] In some embodiments, the antisense strand comprises at least two stabilizing modifications at the 3′-end of the destabilizing modification, i.e., at positions +1 and +2 from the position of the destabilizing modification.

[0565] In some embodiments, the sense strand does not comprise a thermally stabilizing modification in position opposite or complimentary to the thermally destabilizing modification of the duplex in the antisense strand.

[0566] In some embodiments, the antisense strand comprises at least one 2′-fluoro nucleotide adjacent to the destabilizing modification. For example, the 2′-fluoro nucleotide can be the nucleotide at the 5′-end or the 3′-end of the destabilizing modification, i.e., at position-1 or +1 from the position of the destabilizing modification. In some embodiments, the antisense strand comprises a 2′-fluoro nucleotide at each of the 5′-end and the 3′-end of the destabilizing modification, i.e., positions-1 and +1 from the position of the destabilizing modification.

[0567] In some embodiments, the antisense strand comprises at least two 2′-fluoro nucleotides at the 3′-end of the destabilizing modification, i.e., at positions +1 and +2 from the position of the destabilizing modification.

[0568] In some embodiments, the sense strand does not comprise a 2′-fluoro nucleotide in position opposite or complimentary to the thermally destabilizing modification of the duplex in the antisense strand.

[0569] In some embodiments, every nucleotide in the sense strand and/or the antisense strand can be modified. Each nucleotide can be modified with the same or different modification which can include one or more alteration of one or both of the non-linking phosphate oxygens and/or of one or more of the linking phosphate oxygens; alteration of a constituent of the ribose sugar, e.g., of the 2′ hydroxyl on the ribose sugar; wholesale replacement of the phosphate moiety with “dephospho” linkers; modification or replacement of a naturally occurring base; and replacement or modification of the ribose-phosphate backbone.

[0570] As nucleic acids are polymers of monomers, many of the modifications occur at a position which is repeated within a nucleic acid, e.g., a modification of a base, or a phosphate moiety, or a non-linking O of a phosphate moiety. In some cases, the modification will occur at all of the subject positions in the nucleic acid but in many cases it will not. By way of example, a modification may only occur at a 3′ or 5′ terminal position, may only occur in a terminal region, e.g., at a position on a terminal nucleotide or in the last 2, 3, 4, 5, or 10 nucleotides of a strand. A modification may occur in a double strand region, a single strand region, or in both. A modification may occur only in the double strand region of an RNA or may only occur in a single strand region of an RNA. For example, a phosphorothioate modification at a non-linking O position may only occur at one or both termini, may only occur in a terminal region, e.g., at a position on a terminal nucleotide or in the last 2, 3, 4, 5, or 10 nucleotides of a strand, or may occur in double strand and single strand regions, particularly at termini. The 5′ end or ends can be phosphorylated.

[0571] It may be possible, e.g., to enhance stability, to include particular bases in overhangs, or to include modified nucleotides or nucleotide surrogates, in single strand overhangs, e.g., in a 5′ or 3′ overhang, or in both. E.g., it can be desirable to include purine nucleotides in overhangs. In some embodiments all or some of the bases in a 3′ or 5′ overhang may be modified, e.g., with a modification described herein. Modifications can include, e.g., the use of modifications at the 2′ position of the ribose sugar with modifications that are known in the art, e.g., the use of deoxyribonucleotides, 2′-deoxy-2′-fluoro (2′-F) or 2′-O-methyl modified instead of the ribosugar of the nucleobase, and modifications in the phosphate group, e.g., phosphorothioate modifications. Overhangs need not be homologous or orthologous with the target sequence.

[0572] In some embodiments, each residue of the sense strand and/or antisense strand is independently modified with LNA, HNA, CeNA, 2′-methoxyethyl, 2′-O-methyl, 2′-O-allyl, 2′-C-allyl, 2′-deoxy, or 2′-fluoro. The strands can contain more than one modification. In some embodiments, each residue of the sense strand and antisense strand is independently modified with 2′-O-methyl or 2′-fluoro. It is to be understood that these modifications are in addition to the at least one thermally destabilizing modification of the duplex present in the antisense strand.

[0573] At least two different modifications are typically present on the sense strand and antisense strand. Those two modifications may be the 2′-deoxy, 2′-O-methyl or 2′-fluoro modifications, acyclic nucleotides or others. In some embodiments, the sense strand and antisense strand each comprises two differently modified nucleotides selected from 2′-O-methyl or 2′-deoxy. In some embodiments, each residue of the sense strand and antisense strand is independently modified with a 2′-O-methyl nucleotide, 2′-deoxy nucleotide, 2′-deoxy-2′-fluoro nucleotide, 2′-O—N-methylacetamido (2′-O-NMA) nucleotide, a 2′-O-dimethylaminoethoxyethyl (2′-O-DMAEOE) nucleotide, 2′-O-aminopropyl (2′-O-AP) nucleotide, or 2′-ara-F nucleotide. Again, it is to be understood that these modifications are in addition to the at least one thermally destabilizing modification of the duplex present in the antisense strand.

[0574] In some embodiments, the oligonucleotide or dsRNA described herein comprises modifications of an alternating pattern, particular in the B1, B2, B3, B1′, B2′, B3′, B4′ regions. The term “alternating motif” or “alternative pattern” as used herein refers to a motif having one or more modifications, each modification occurring on alternating nucleotides of one strand. The alternating nucleotide may refer to one per every other nucleotide or one per every three nucleotides, or a similar pattern. For example, if A, B and C each represent one type of modification to the nucleotide, the alternating motif can be “ABABABABABAB . . . ,”

[0575] “AABBAABBAABB . . . ,” “AABAABAABAAB . . . ,” “AAABAAABAAAB . . . ,”

[0576] “AAABBBAAABBB . . . ,” or “ABCABCABCABC . . . ,” etc.

[0577] The type of modifications contained in the alternating motif may be the same or different. For example, if A, B, C, D each represent one type of modification on the nucleotide, the alternating pattern, i.e., modifications on every other nucleotide, may be the same, but each of the sense strand or antisense strand can be selected from several possibilities of modifications within the alternating motif such as “ABABAB . . . ”, “ACACAC . . . ” “BDBDBD . . . ” or “CDCDCD . . . ,” etc.

[0578] In some embodiments, the dsRNA comprises the modification pattern for the alternating motif on the sense strand relative to the modification pattern for the alternating motif on the antisense strand is shifted. The shift may be such that the modified group of nucleotides of the sense strand corresponds to a differently modified group of nucleotides of the antisense strand and vice versa. For example, the sense strand when paired with the antisense strand in the dsRNA, the alternating motif in the sense strand may start with “ABABAB” from 5′-3′ of the strand and the alternating motif in the antisense strand may start with “BABABA” from 3′-5′ of the strand within the duplex region. As another example, the alternating motif in the sense strand may start with “AABBAABB” from 5′-3′ of the strand and the alternating motif in the antisense strand may start with “BBAABBAA” from 3′-5′ of the strand within the duplex region, so that there is a complete or partial shift of the modification patterns between the sense strand and the antisense strand.

[0579] In some embodiments, the oligonucleotide or dsRNA described herein comprises mismatch(es) with the target, within the duplex, or combinations thereof. The mismatch can occur in the overhang region or the duplex region. The base pair can be ranked on the basis of their propensity to promote dissociation or melting (e.g., on the free energy of association or dissociation of a particular pairing, the simplest approach is to examine the pairs on an individual pair basis, though next neighbor or similar analysis can also be used). In terms of promoting dissociation: A:U is preferred over G:C; G:U is preferred over G:C; and I:C is preferred over G: C (I-inosine). Mismatches, e.g., non-canonical or other than canonical pairings (as described elsewhere herein) are preferred over canonical (A: T, A: U, G: C) pairings; and pairings which include a universal base are preferred over canonical pairings.

[0580] In some embodiments, the dsRNA comprises at least one of the first 1, 2, 3, 4, or 5 base pairs within the duplex regions from the 5′-end of the antisense strand can be chosen independently from the group of: A:U, G:U, I:C, and mismatched pairs, e.g., non-canonical or other than canonical pairings or pairings which include a universal base, to promote the dissociation of the antisense strand at the 5′-end of the duplex.

[0581] In some embodiments, the nucleotide at the 1 position within the duplex region from the 5′-end in the antisense strand is selected from the group consisting of A, dA, dU, U, and dT. Alternatively, at least one of the first 1, 2 or 3 base pair within the duplex region from the 5′-end of the antisense strand is an AU base pair. For example, the first base pair within the duplex region from the 5′-end of the antisense strand is an AU base pair.

[0582] Without wishing to be bound by a theory, introducing 4′-modified and/or 5′-modified nucleotides to the 3′-end of a phosphodiester (PO), phosphorothioate (PS), and/or phosphorodithioate (PS2) linkage of a dinucleotide at any position of single stranded or double stranded nucleic acid can exert steric effect to the internucleotide linkage and, hence, protecting or stabilizing it against nucleases.

[0583] In some embodiments, a 5′-modified nucleoside is introduced at the 3′-end of a dinucleotide at any position of the sense and/or the antisense strand. For instance, a 5′-alkylated nucleoside can be introduced at the 3′-end of a dinucleotide at any position of the sense and/or the antisense strand. The alkyl group at the 5′ position of the ribose sugar can be a racemic or enantiomerically pure R or S isomer. An exemplary 5′-alkylated nucleoside is a 5′-methyl nucleoside. The 5′-methyl can be either a racemic or enantiomerically pure R or S isomer.

[0584] In some embodiments, a 4′-modified nucleoside is introduced at the 3′-end of a dinucleotide at any position of the sense and/or the antisense strand. For instance, a 4′-alkylated nucleoside may be introduced at the 3′-end of a dinucleotide at any position the sense and/or the antisense strand. The alkyl group at the 4′ position of the ribose sugar can be a racemic or enantiomerically pure R or S isomer. An exemplary 4′-alkylated nucleoside is a 4′-methyl nucleoside. The 4′-methyl can be either racemic or enantiomerically pure R or S isomer. Alternatively, a 4′-O-alkylated nucleoside may be introduced at the 3′-end of a dinucleotide at any position of the sense and/or the antisense strand. The 4′-O-alkyl of the ribose sugar can be a racemic or enantiomerically pure R or S isomer. An exemplary 4′-O-alkylated nucleoside is a 4′-O-methyl nucleoside. The 4′-O-methyl can be either a racemic or enantiomerically pure R or S isomer.

[0585] In some embodiments, a 5′-alkylated nucleoside is introduced at any position on the sense strand or antisense strand of the sense and/or the antisense strand, and such modification maintains or improves potency of the double-stranded nucleic acid. The 5′-alkyl can be either a racemic or enantiomerically pure R or S isomer. An exemplary 5′-alkylated nucleoside is a 5′-methyl nucleoside. The 5′-methyl can be either a racemic or enantiomerically pure R or S isomer.

[0586] In some embodiments, a 4′-alkylated nucleoside is introduced at any position on the sense strand or antisense strand of the dsRNA, and such modification maintains or improves potency of the dsRNA. The 4′-alkyl can be either a racemic or enantiomerically pure R or Sisomer.

[0587] An exemplary 4′-alkylated nucleoside is a 4′-methyl nucleoside. The 4′-methyl can be either a racemic or enantiomerically pure R or S isomer.

[0588] In some embodiments, a 4′-O-alkylated nucleoside is introduced at any position on the sense strand or antisense strand of the dsRNA, and such modification maintains or improves potency of the dsRNA. The 5′-alkyl can be either a racemic or enantiomerically pure R or Sisomer. An exemplary 4′-O-alkylated nucleoside is a 4′-O-methyl nucleoside. The 4′-O-methyl can be either a racemic or enantiomerically pure R or S isomer.

[0589] In some embodiments, the oligonucleotide or dsRNA described herein can comprise 2′-5′ linkages (with 2′-H, 2′-OH and 2′-OMe and with P—O or P═S). For example, the 2′-5′ linkages modifications can be used to promote nuclease resistance or to inhibit binding of the sense to the antisense strand, or can be used at the 5′ end of the sense strand to avoid sense strand activation by RISC. In some embodiments, the sense strand comprises a 2′-5′-linkage between positions N-1 and N-2, counting from 5′-end.

[0590] In some embodiments, the oligonucleotide or dsRNA described herein dsRNA can comprise L sugars (e.g., L ribose, L-arabinose with 2′-H, 2′-OH and 2′-OMe). For example, these L sugars modifications can be used to promote nuclease resistance or to inhibit binding of the sense to the antisense strand, or can be used at the 5′ end of the sense strand to avoid sense strand activation by RISC. In some embodiments, the sense strand comprises a L sugar nucleotide at the 5′-end.

### Ligands

[0591] Embodiments of the various aspects described herein include a ligand. Without wishing to be bound by a theory, ligands modify one or more properties of the attached molecule (e.g., the oligonucleotide described herein) including but not limited to pharmacodynamic, pharmacokinetic, binding, absorption, cellular distribution, cellular uptake, charge and clearance. Ligands are routinely used in the chemical arts and are linked directly or via an optional linking moiety or linking group to a parent compound. A preferred list of ligands includes without limitation, intercalators, reporter molecules, polyamines, polyamides, polyethylene glycols, thioethers, polyethers, cholesterols, thiocholesterols, cholic acid moieties, folate, lipids, phospholipids, biotin, phenazine, phenanthridine, anthraquinone, adamantane, acridine, fluoresceins, rhodamines, coumarins and dyes.

[0592] Preferred ligands amenable to the present invention include lipid moieties such as a cholesterol moiety (Letsinger et al., Proc. Natl. Acad. Sci. USA, 1989, 86, 6553); cholic acid (Manoharan et al., Bioorg. Med. Chem. Lett., 1994, 4, 1053); a thioether, e.g., hexyl-S-tritylthiol (Manoharan et al., Ann. N.Y. Acad. Sci., 1992, 660, 306; Manoharan et al., Bioorg. Med. Chem. Let., 1993, 3, 2765); a thiocholesterol (Oberhauser et al., Nucl. Acids Res., 1992, 20, 533); an aliphatic chain, e.g., dodecandiol or undecyl residues (Saison-Behmoaras et al., EMBO J., 1991, 10, 111; Kabanov et al., FEBS Lett., 1990, 259, 327; Svinarchuk et al., Biochimie, 1993, 75, 49); a phospholipid, e.g., di-hexadecyl-rac-glycerol or triethylammonium-1,2-di-O-hexadecyl-rac-glycero-3-H-phosphonate (Manoharan et al., Tetrahedron Lett., 1995, 36, 3651; Shea et al., Nucl. Acids Res., 1990, 18, 3777); a polyamine or a polyethylene glycol chain (Manoharan et al., Nucleosides & Nucleotides, 1995, 14, 969); adamantane acetic acid (Manoharan et al., Tetrahedron Lett., 1995, 36, 3651); a palmityl moiety (Mishra et al., Biochim. Biophys. Acta, 1995, 1264, 229); or an octadecylamine or hexylamino-carbonyl-oxycholesterol moiety (Crooke et al., J. Pharmacol. Exp. Ther., 1996, 277, 923).

[0593] Ligands can include naturally occurring molecules, or recombinant or synthetic molecules. Exemplary ligands include, but are not limited to, polylysine (PLL), poly L-aspartic acid, poly L-glutamic acid, styrene-maleic acid anhydride copolymer, poly (L-lactide-co-glycolied) copolymer, divinyl ether-maleic anhydride copolymer, N-(2-hydroxylpropyl) methacrylamide copolymer (HMPA), polyethylene glycol (PEG, e.g., PEG-2K, PEG-5K, PEG-10K, PEG-12K, PEG-15K, PEG-20K, PEG-40K), MPEG, [MPEG]₂, polyvinyl alcohol (PVA), polyurethane, poly(2-ethylacryllic acid), N-isopropylacrylamide polymers, polyphosphazine, polyethylenimine, cationic groups, spermine, spermidine, polyamine, pseudopeptide-polyamine, peptidomimetic polyamine, dendrimer polyamine, arginine, amidine, protamine, cationic lipid, cationic porphyrin, quaternary salt of a polyamine, thyrotropin, melanotropin, lectin, glycoprotein, surfactant protein A, mucin, glycosylated polyaminoacids, transferrin, bisphosphonate, polyglutamate, polyaspartate, aptamer, asialofetuin, hyaluronan, procollagen, immunoglobulins (e.g., antibodies), insulin, transferrin, albumin, sugar-albumin conjugates, intercalating agents (e.g., acridines), cross-linkers (e.g. psoralen, mitomycin C), porphyrins (e.g., TPPC4, texaphyrin, Sapphyrin), polycyclic aromatic hydrocarbons (e.g., phenazine, dihydrophenazine), artificial endonucleases (e.g., EDTA), lipophilic molecules (e.g, steroids, bile acids, cholesterol, cholic acid, adamantane acetic acid, 1-pyrene butyric acid, dihydrotestosterone, 1,3-Bis-O(hexadecyl)glycerol, geranyloxyhexyl group, hexadecylglycerol, borneol, menthol, 1,3-propanediol, heptadecyl group, palmitic acid, myristic acid,O3-(oleoyl) lithocholic acid, O3-(oleoyl) cholenic acid, dimethoxytrityl, or phenoxazine), peptides (e.g., an alpha helical peptide, amphipathic peptide, RGD peptide, cell permeation peptide, endosomolytic/fusogenic peptide), alkylating agents, phosphate, amino, mercapto, polyamino, alkyl, substituted alkyl, radiolabeled markers, enzymes, haptens (e.g. biotin), transport/absorption facilitators (e.g., naproxen, aspirin, vitamin E, folic acid), synthetic ribonucleases (e.g., imidazole, bisimidazole, histamine, imidazole clusters, acridine-imidazole conjugates, Eu3+ complexes of tetraazamacrocycles), dinitrophenyl, HRP, AP, antibodies, hormones and hormone receptors, lectins, carbohydrates, multivalent carbohydrates, vitamins (e.g., vitamin A, vitamin E, vitamin K, vitamin B, e.g., folic acid, B12, riboflavin, biotin and pyridoxal), vitamin cofactors, lipopolysaccharide, an activator of p38 MAP kinase, an activator of NF-κB, taxon, vincristine, vinblastine, cytochalasin, nocodazole, japlakinolide, latrunculin A, phalloidin, swinholide A, indanocine, myoservin, tumor necrosis factor alpha (TNFalpha), interleukin-1 beta, gamma interferon, natural or recombinant low density lipoprotein (LDL), natural or recombinant high-density lipoprotein (HDL), and a cell-permeation agent (e.g., a.helical cell-permeation agent).

[0594] Peptide and peptidomimetic ligands include those having naturally occurring or modified peptides, e.g., D or L peptides; a, B, or y peptides; N-methyl peptides; azapeptides; peptides having one or more amide, i.e., peptide, linkages replaced with one or more urea, thiourea, carbamate, or sulfonyl urea linkages; or cyclic peptides. A peptidomimetic (also referred to herein as an oligopeptidomimetic) is a molecule capable of folding into a defined three-dimensional structure similar to a natural peptide. The peptide or peptidomimetic ligand can be about 5-50 amino acids long, e.g., about 5, 10, 15, 20, 25, 30, 35, 40, 45, or 50 amino acids long.

[0595] Exemplary amphipathic peptides include, but are not limited to, cecropins, lycotoxins, paradaxins, buforin, CPF, bombinin-like peptide (BLP), cathelicidins, ceratotoxins, S. clava peptides, hagfish intestinal antimicrobial peptides (HFIAPs), magainines, brevinins-2, dermaseptins, melittins, pleurocidin, H₂A peptides, Xenopus peptides, esculentinis-1, and caerins.

[0596] As used herein, the term “endosomolytic ligand” refers to molecules having endosomolytic properties. Endosomolytic ligands promote the lysis of and/or transport of the composition of the invention, or its components, from the cellular compartments such as the endosome, lysosome, endoplasmic reticulum (ER), Golgi apparatus, microtubule, peroxisome, or other vesicular bodies within the cell, to the cytoplasm of the cell. Some exemplary endosomolytic ligands include, but are not limited to, imidazoles, poly or oligoimidazoles, linear or branched polyethyleneimines (PEIs), linear and brached polyamines, e.g. spermine, cationic linear and branched polyamines, polycarboxylates, polycations, masked oligo or poly cations or anions, acetals, polyacetals, ketals/polyketals, orthoesters, linear or branched polymers with masked or unmasked cationic or anionic charges, dendrimers with masked or unmasked cationic or anionic charges, polyanionic peptides, polyanionic peptidomimetics, pH-sensitive peptides, natural and synthetic fusogenic lipids, natural and synthetic cationic lipids.

[0597] Exemplary endosomolytic/fusogenic peptides include, but are not limited to, AALEALAEALEALAEALEALAEAAAAGGC (GALA) (SEQ ID NO.: 1);

[0598] AALAEALAEALAEALAEALAEALAAAAGGC (EALA) (SEQ ID NO.: 2);

[0599] ALEALAEALEALAEA (SEQ ID NO.: 3); GLFEAIEGFIENGWEGMIWDYG (INF-7) (SEQ ID NO.: 4); GLFGAIAGFIENGWEGMIDGWYG (Inf HA-2) (SEQ ID NO.: 5);

[0600] GLFEAIEGFIENGWEGMIDGWYGCGLFEAIEGFIENGWEGMID GWYGC (diINF-7) (SEQ ID NO.: 6); GLFEAIEGFIENGWEGMIDGGCGLFEAIEGFIENGWEGMIDGGC (diINF-3) (SEQ ID NO.: 7); GLFGALAEALAEALAEHLAEALAEALEALAAGGSC (GLF) (SEQ ID NO.:
[0601] 8); GLFEAIEGFIENGWEGLAEALAEALEALAAGGSC (GALA-INF3) (SEQ ID NO.: 9); GLF EAI EGFI ENGW EGnI DG K GLF EAI EGFI ENGW EGnI DG (INF-5, n is norleucine) (SEQ ID NO.: 10); LFEALLELLESLWELLLEA (JTS-1) (SEQ ID NO.: 11); GLFKALLKLLKSLWKLLLKA (ppTG1) (SEQ ID NO.: 12); GLFRALLRLLRSLWRLLLRA (ppTG20) (SEQ ID NO.: 13); WEAKLAKALAKALAKHLAKALAKALKACEA (KALA) (SEQ ID NO.: 14); GLFFEAIAEFIEGGWEGLIEGC (HA) (SEQ ID NO.: 15); GIGAVLKVLTTGLPALISWIKRKRQQ (Melittin) (SEQ ID NO.: 16); HsWYG (SEQ ID NO.: 17); and CHK&HC (SEQ ID NO.: 18).

[0602] Without wishing to be bound by theory, fusogenic lipids fuse with and consequently destabilize a membrane. Fusogenic lipids usually have small head groups and unsaturated acyl chains. Exemplary fusogenic lipids include, but are not limited to, 1,2-dileoyl-sn-3-phosphoethanolamine (DOPE), phosphatidylethanolamine (POPE), palmitoyloleoylphosphatidylcholine (POPC), (6Z,9Z,28Z,31Z)-heptatriaconta-6,9,28,31-tetraen-19-ol (Di-Lin), N-methyl (2,2-di((9Z,12Z)-octadeca-9,12-dienyl)-1,3-dioxolan-4-yl) methanamine (DLin-k-DMA) and N-methyl-2-(2,2-di((9Z,12Z)-octadeca-9,12-dienyl)-1,3-dioxolan-4-yl) ethanamine (also refered to as XTC herein).

[0603] Synthetic polymers with endosomolytic activity amenable to the present invention are described in U.S. Pat. App. Pub. Nos. 2009/0048410; 2009/0023890; 2008/0287630; 2008/0287628; 2008/0281044; 2008/0281041; 2008/0269450; 2007/0105804; 20070036865; and 2004/0198687, contents of which are hereby incorporated by reference in their entirety.

[0604] Exemplary cell permeation peptides include, but are not limited to, RQIKIWFQNRRMKWKK (penetratin) (SEQ ID NO.: 19); GRKKRRQRRRPPQC (Tat fragment 48-60) (SEQ ID NO.: 20); GALFLGWLGAAGSTMGAWSQPKKKRKV (signal sequence based peptide) (SEQ ID NO.: 21); LLIILRRRIRKQAHAHSK (PVEC) (SEQ ID NO.: 22); GWTLNSAGYLLKINLKALAALAKKIL (SEQ (transportan) ID NO.: 23); KLALKLALKALKAALKLA (amphiphilic model peptide) (SEQ ID NO.: 24); RRRRRRRRR (Arg9) (SEQ ID NO.: 25); KFFKFFKFFK (Bacterial cell wall permeating peptide) (SEQ ID NO.: 26); LLGDFFRKSKEKIGKEFKRIVQRIKDFLRNLVPRTES (LL-37) (SEQ ID NO.: 27); SWLSKTAKKLENSAKKRISEGIAIAIQGGPR (cecropin P1) (SEQ ID NO.: 28);
[0605] ACYCRIPACIAGERRYGTCIYQGRLWAFCC (α-defensin) (SEQ ID NO.: 29);
[0606] DHYNCVSSGGQCLYSACPIFTKIQGTCYRGKAKCCK (β-defensin) (SEQ ID NO.: 30); RRRPRPPYLPRPRPPPFFPPRLPPRIPPGFPPRFPPRFPGKR-NH₂ (PR-39) (SEQ ID NO.: 31;
[0607] ILPWKWPWWPWRR-NH₂ (indolicidin) (SEQ ID NO.: 32); AAVALLPAVLLALLAP (RFGF) (SEQ ID NO.: 33); AALLPVLLAAP (RFGF analogue) (SEQ ID NO.: 34); and RKCRIVVIRVCR (bactenecin) (SEQ ID NO.: 35).

[0608] Exemplary cationic groups include, but are not limited to, protonated amino groups, derived from e.g., O-AMINE (AMINE=NH₂; alkylamino, dialkylamino, heterocyclyl, arylamino, diaryl amino, heteroaryl amino, or diheteroaryl amino, ethylene diamine, polyamino); aminoalkoxy, e.g., O(CH₂) nAMINE, (e.g., AMINE=NH₂; alkylamino, dialkylamino, heterocyclyl, arylamino, diaryl amino, heteroaryl amino, or diheteroaryl amino, ethylene diamine, polyamino); amino (e.g. NH₂; alkylamino, dialkylamino, heterocyclyl, arylamino, diaryl amino, heteroaryl amino, diheteroaryl amino, or amino acid); and NH(CH₂CH₂NH)ₙCH₂CH₂-AMINE (AMINE=NH₂; alkylamino, dialkylamino, heterocyclyl, arylamino, diaryl amino, heteroaryl amino, or diheteroaryl amino).

[0609] As used herein the term “targeting ligand” refers to any molecule that provides an enhanced affinity for a selected target, e.g., a cell, cell type, tissue, organ, region of the body, or a compartment, e.g., a cellular, tissue or organ compartment. Some exemplary targeting ligands include, but are not limited to, antibodies, antigens, folates, receptor ligands, carbohydrates, aptamers, integrin receptor ligands, chemokine receptor ligands, transferrin, biotin, serotonin receptor ligands, PSMA, endothelin, GCPII, somatostatin, LDL and HDL ligands.

[0610] Carbohydrate based targeting ligands include, but are not limited to, D-galactose, multivalent galactose, N-acetyl-D-galactosamine (GalNAc), multivalent GalNAc, e.g. GalNAc2 and GalNAc3; D-mannose, multivalent mannose, multivalent lactose, N-acetyl-gulucosamine, multivalent fucose, glycosylated polyaminoacids and lectins. The term multivalent indicates that more than one monosaccharide unit is present. Such monosaccharide subunits can be linked to each other through glycosidic linkages or linked to a scaffold molecule.

[0611] A number of folate and folate analogs amenable to the present invention as ligands are described in U.S. Pat. Nos. 2,816,110; 5,552,545; 6,335,434 and 7,128,893, contents of which are herein incorporated in their entireties by reference.

[0612] As used herein, the terms “PK modulating ligand” and “PK modulator” refers to molecules which can modulate the pharmacokinetics of oligonucleotides described herein. Some exemplary PK modulator include, but are not limited to, lipophilic molecules, bile acids, sterols, phospholipid analogues, peptides, protein binding agents, vitamins, fatty acids, phenoxazine, aspirin, naproxen, ibuprofen, suprofen, ketoprofen, (S)-(+)-pranoprofen, carprofen, PEGs, biotin, and transthyretia-binding ligands (e.g., tetraiidothyroacetic acid, 2, 4, 6-triiodophenol and flufenamic acid). Oligomeric compounds that comprise a number of phosphorothioate intersugar linkages are also known to bind to serum protein, thus short oligomeric compounds, e.g.

[0613] oligonucleotides of comprising from about 5 to 30 nucleotides (e.g., 5 to 25 nucleotides, preferably 5 to 20 nucleotides, e.g., 5, 6, 7, 8, 9, 10, 11, 12, 13, 14, 15, 16, 17, 18, 19, or 20 nucleotides), and that comprise a plurality of phosphorothioate linkages in the backbone are also amenable to the present invention as ligands (e.g. as PK modulating ligands). The PK modulating oligonucleotide can comprise at least 3, 4, 5, 6, 7, 8, 9, 10, 11, 12, 13, 14, 15 or more phosphorothioate and/or phosphorodithioate linkages. In some embodiments, all internucleoside linkages in PK modulating oligonucleotide are phosphorothioate and/or phosphorodithioates linkages. In addition, aptamers that bind serum components (e.g. serum proteins) are also amenable to the present invention as PK modulating ligands. Binding to serum components (e.g. serum proteins) can be predicted from albumin binding assays, scuh as those described in Oravcova, et al., Journal of Chromatography B (1996), 677:1-27.

[0614] When two or more ligands are present, the ligands can all have same properties, all have different properties or some ligands have the same properties while others have different properties. For example, a ligand can have targeting properties, have endosomolytic activity or have PK modulating properties. In a preferred embodiment, all the ligands have different properties.

[0615] In some embodiments of any one of the aspects, the ligand has a structure shown in any of Formula (IV)—(VII):

[chemical structure]

[0616] wherein:
[0617] q^{2A}, q^{2B}, q^{3A}, q^{3B}, q^{4A}, q^{4B}, q^{5A}, q^{5B} and q^{5C} represent independently for each occurrence 0-20 and wherein the repeating unit can be the same or different;
[0618] P^{2A}, P^{2B}, P^{3A}, P^{3B}, P^{4A}, P^{4B}, P^{5A}, P^{5B}, P^{5C}, T^{2A}, T^{2B}, T^{3A}, T^{3B}, T^{4A}, T^{4B}, T^{5A}, T^{5B}, T^{5C} are each independently for each occurrence absent, CO, NH, O, S, OC(O), NHC(O), CH₂, CH₂NH or CH₂O;
[0619] Q^{2A}, Q^{2B}, Q^{3A}, Q^{3B}, Q^{4A}, Q^{4B}, Q^{5A}, Q^{5B}, Q^{5C} are independently for each occurrence absent, alkylene, substituted alkylene wherein one or more methylenes can be interrupted or terminated by one or more of O, S, S(O), SO₂, N(RN), C(R′)═C(R″), C≡C or C(O);
[0620] R^{2A}, R^{2B}, R^{3A}, R^{3B}, R^{4A}, R^{4B}, R^{5A}, R^{5B}, R^{5C} are each independently for each occurrence absent, NH, O, S, CH₂, C(O)O, C(O)NH, NHCH(R^{a})C(O), —C(O)—CH(R^{a})—NH—, CO, CH═N—O,

[chemical structure]

or heterocyclyl;
[0621] L^{2A}, L^{2B}, L^{3A}, L^{3B}, L^{4A}, L^{4B}, L^{5A}, L^{5B} and L^{5C} represent the ligand; i.e. each independently for each occurrence a monosaccharide (such as GalNAc), disaccharide, trisaccharide, tetrasaccharide, oligosaccharide, or polysaccharide; and
[0622] R^{a} is H or amino acid side chain.

[0623] In some embodiments of any one of the aspects, the ligand is of Formula (VII):

[chemical structure]

[0624] wherein L^{5A}, L^{5B} and L^{5C} represent a monosaccharide, such as GalNAc derivative.

[0625] Exemplary ligands include, but are not limited to, the following:

[chemical structure]

[chemical structure]

[chemical structure]

[0626] In some embodiments of any one of the aspects described herein, the ligand is a ligand described in U.S. Pat. No. 5,994,517 or U.S. Pat. No. 6,906,182, content of each of which is incorporated herein by reference in its entirety.

[0627] In some embodiments, the ligand can be a tri-antennary ligand described in FIG. 3 of U.S. Pat. No. 6,906,182. For example, the ligand is selected from the following tri-antennary ligands:

Tri-antennary

[chemical structure]

tris((heteroatom)methyl)-[heteroatom]methane

[chemical structure]

digfutamyl*

[chemical structure]

diasparatyl

[chemical structure]

X = NH, O, S
Y = P or S
Z = NH-alkyl, NH₂, O⁻, S⁻
A = NH, CH₂, O, S
n = 2 to 17.2-carbon units
Carbohydrate =

[chemical structure]

[0628] In some embodiments, the ligand can be a ligand described, e.g., in FIGS. 4A and 4B of US2021/0123048, contents of which are incorporated herein by reference in their entireties. In some embodiments of any one of the aspects described herein, the ligand can be

[chemical structure]

[chemical structure]

[chemical structure]

[0629] It is noted that when more than one ligands are present, they can be same or different. Accordingly, in some embodiments of any one of the aspects described herein, all ligands are same. In some other embodiments of any one of the aspects described herein, ligands are different.

[0630] Some exemplary ligands include, but are not limited to, peptides, centyrins, antibodies, antibody fragments, T-cell targeting ligands, B-cell targeting ligands, cancer cell targeting ligands (DUPA, folate, RGD), spleen targeting functionalities, lung targeting functionalitie, bone marrow targeting functionalities, antiCD-4 antobodies, antiCD-117 antibodies, phage Display peptides, cell permeation peptides (CPPs), itegrin ligands, multianionic ligands, multicationic ligands, carbohydrates (GalNAc, mannose, mannose-6 phosphate, fucose, glucose, monovalent and multivalent), kidney targeting ligands, blood-brain barrier (BBB) penetration ligands, lipids and amino acids (L-amino acids, D-amino acids, β-amino acids).

[0631] In some embodiments, the ligand comprises a lipophilic group. For example, the ligand can be a C₆-30aliphatic group or a C₁₀₋₃₀ aliphatic group. In some embodiments, the ligand is a C₁₀₋₃₀alkyl, C₁₀₋₃₀alkenyl or C₁₀₋₃₀alkynyl group. For example, the ligand is a straight-chain or branched hexyl, octyl, decyl, dodecyl, tetradecyl, hexadecyl, octadecyl, icosyl, docosyl, or tetracosyl group. In some embodiments, the ligand is a straight-chain hexyl, octyl, decyl, dodecyl, tetradecyl, hexadecyl, octadecyl, icosyl, docosyl, or tetracosyl group. For example, the ligand is a straight-chain hexyl, octyl, decyl, dodecyl, hexadecyl, octadecyl, icosyl, or docosyl group. For example, the ligand is a straight-chain hexadecyl group. In another example, the ligand is a straight-chain docosyl group.

[0632] In some embodiments of any one of the aspects described herein, the ligand is selected from the group consisting of ligands shown in FIGS. 25A-25D.

### Linkers

[0633] Embodiments of the various aspects described herein include a linker. As used herein, the term “linker” means an organic moiety that connects two parts of a compound. Linkers typically comprise a direct bond or an atom such as oxygen or sulfur, a unit such as NR¹, C(O), C(O) O, C(O)NR¹, SO, SO₂, SO₂NH or a chain of atoms, such as substituted or unsubstituted alkyl, substituted or unsubstituted alkenyl, substituted or unsubstituted alkynyl, arylalkyl, arylalkenyl, arylalkynyl, heteroarylalkyl, heteroarylalkenyl, heteroarylalkynyl, heterocyclylalkyl, heterocyclylalkenyl, heterocyclylalkynyl, aryl, heteroaryl, heterocyclyl, cycloalkyl, cycloalkenyl, alkylarylalkyl, alkylarylalkenyl, alkylarylalkynyl, alkenylarylalkyl, alkenylarylalkenyl, alkenylarylalkynyl, alkynylarylalkyl, alkynylarylalkenyl, alkynylarylalkynyl, alkylheteroarylalkyl, alkylheteroarylalkenyl, alkylheteroarylalkynyl, alkenylheteroarylalkyl, alkenylheteroarylalkenyl, alkenylheteroarylalkynyl, alkynylheteroarylalkyl, alkynylheteroarylalkenyl, alkynylheteroarylalkynyl, alkylheterocyclylalkyl, alkylheterocyclylalkenyl, alkenylheterocyclylalkyl, alkenylheterocyclylalkenyl, alkylhererocyclylalkynyl, alkenylheterocyclylalkynyl, alkynylheterocyclylalkyl, alkynylheterocyclylalkenyl, alkynylheterocyclylalkynyl, alkylaryl, alkenylaryl, alkynylaryl, alkylheteroaryl, alkenylheteroaryl, alkynylhereroaryl, where one or more methylenes can be interrupted or terminated by O, S, S(O), SO₂, N(R^{LL}) 2, C(O), cleavable linking group, substituted or unsubstituted aryl, substituted or unsubstituted heteroaryl, substituted or unsubstituted heterocyclic; where R^{LL} is hydrogen, acyl, aliphatic or substituted aliphatic.

[0634] In some embodiments, the linker is a cleavable linker. Cleavable linkers are those that rely on processes inside a target cell to liberate the two parts the linker is holding together, as reduction in the cytoplasm, exposure to acidic conditions in a lysosome or endosome, or cleavage by specific enzymes (e.g. proteases) within the cell. As such, cleavable linkers allow the two parts to be released in their original form after internalization and processing inside a target cell. Cleavable linkers include, but are not limited to, those whose bonds can be cleaved by enzymes (e.g., peptide linkers); reducing conditions (e.g., disulfide linkers); or acidic conditions (e.g., hydrazones and carbonates).

[0635] Generally, the cleavable linker comprises at least one cleavable linking group. A cleavable linking group is one which is sufficiently stable outside the cell, but which upon entry into a target cell is cleaved to release the two parts the linker is holding together. In a preferred embodiment, the cleavable linking group is cleaved at least 10 times or more, preferably at least 100 times faster in the target cell or under a first reference condition (which can, e.g., be selected to mimic or represent intracellular conditions) than in the blood or serum of a subject, or under a second reference condition (which can, e.g., be selected to mimic or represent conditions found in the blood or serum).

[0636] Cleavable linking groups are susceptible to cleavage agents, e.g., pH, redox potential or the presence of degradative molecules. Generally, cleavage agents are more prevalent or found at higher levels or activities inside cells than in serum or blood. Examples of such degradative agents include: redox agents which are selected for particular substrates or which have no substrate specificity, including, e.g., oxidative or reductive enzymes or reductive agents such as mercaptans, present in cells, that can degrade a redox cleavable linking group by reduction; esterases; endosomes or agents that can create an acidic environment, e.g., those that result in a pH of five or lower; enzymes that can hydrolyze or degrade an acid cleavable linking group by acting as a general acid, peptidases (which can be substrate specific), and phosphatases.

[0637] A cleavable linkage group, such as a disulfide bond can be susceptible to pH. The pH of human serum is 7.4, while the average intracellular pH is slightly lower, ranging from about 7.1-7.3. Endosomes have a more acidic pH, in the range of 5.5-6.0, and lysosomes have an even more acidic pH at around 5.0. Some linkers will have a cleavable linking group that is cleaved at a preferred pH, thereby releasing the cationic lipid from the ligand inside the cell, or into the desired compartment of the cell.

[0638] A linker can include a cleavable linking group that is cleavable by a particular enzyme. The type of cleavable linking group incorporated into a linker can depend on the cell to be targeted. For example, liver targeting ligands can be linked to the cationic lipids through a linker that includes an ester group. Liver cells are rich in esterases, and therefore the linker will be cleaved more efficiently in liver cells than in cell types that are not esterase-rich. Other cell-types rich in esterases include cells of the lung, renal cortex, and testis. Linkers that contain peptide bonds can be used when targeting cell types rich in peptidases, such as liver cells and synoviocytes.

[0639] In general, the suitability of a candidate cleavable linking group can be evaluated by testing the ability of a degradative agent (or condition) to cleave the candidate linking group. It will also be desirable to also test the candidate cleavable linking group for the ability to resist cleavage in the blood or when in contact with other non-target tissue. Thus one can determine the relative susceptibility to cleavage between a first and a second condition, where the first is selected to be indicative of cleavage in a target cell and the second is selected to be indicative of cleavage in other tissues or biological fluids, e.g., blood or serum. The evaluations can be carried out in cell free systems, in cells, in cell culture, in organ or tissue culture, or in whole animals. It may be useful to make initial evaluations in cell-free or culture conditions and to confirm by further evaluations in whole animals. In preferred embodiments, useful candidate compounds are cleaved at least 2, 4, 10 or 100 times faster in the cell (or under in vitro conditions selected to mimic intracellular conditions) as compared to blood or serum (or under in vitro conditions selected to mimic extracellular conditions).

[0640] One class of cleavable linking groups is redox cleavable linking groups, which may be used according to the present invention that are cleaved upon reduction or oxidation. An example of reductively cleavable linking group is a disulfide linking group (—S—S—).

[0641] Phosphate-based cleavable linking groups, which may be used in the linkers according to the present invention, are cleaved by agents that degrade or hydrolyze the phosphate group. An example of an agent that cleaves phosphate groups in cells are enzymes such as phosphatases in cells. Examples of phosphate-based linking groups are —O—P(O)(OR^{k})—O—, —O—P(S)(OR^{k})—O—, —O—P(S)(SR^{k})—O—, —S—P(O)(OR^{k})—O—, —O—P(O)(OR)—S—, —S—P(O)(OR^{k})—S—, —O—P(S)(OR)—S—, —S—P(S)(OR^{k})—O—, —O—P(O)(R^{k})—O—, —O—P(S)(R^{k})—O—, —S—P(O)(R^{k})—O—, —S—P(S)(R^{k})—O—, —S—P(O)(R^{k})—S—, —O—P(S)(R^{k})—S—, wherein R^{k} at each occurrence can be, independently, hydrogen, C₁₋₂₀alkyl, C₁₋₂₀haloalkyl, C₆₋₁₀aryl, C₇₋₁₂aralkyl. Preferred embodiments are —O—P(O)(OH)—O—, —O—P(S)(OH)—O—, —O—P(S)(SH)—O—, —S—P(O)(OH)—O—, —O—P(O)(OH)—S—, —S—P(O)(OH)—S—, —O—P(S)(OH)—S—, —S—P(S)(OH)—O—, —O—P(O)(H)—O—, —O—P(S)(H)—O—, —S—P(O)(H)—O—, —S—P(S)(H)—O—, —S—P(O)(H)—S—, —O—P(S)(H)—S—. A preferred embodiment is —O—P(O)(OH)—O—. These candidates can be evaluated using methods analogous to those described above.

[0642] Acid cleavable linking groups, which may be used in the linkers according to the present invention, are linking groups that are cleaved under acidic conditions. In preferred embodiments acid cleavable linking groups are cleaved in an acidic environment with a pH of about 6.5 or lower (e.g., about 6.0, 5.5, 5.0, or lower), or by agents such as enzymes that can act as a general acid. In a cell, specific low pH organelles, such as endosomes and lysosomes can provide a cleaving environment for acid cleavable linking groups. Examples of acid cleavable linking groups include but are not limited to hydrazones, esters, and esters of amino acids. Acid cleavable groups can have the general formula —C═NN—, C(O) O, or —OC(O). A preferred embodiment is when the carbon attached to the oxygen of the ester (the alkoxy group) is an aryl group, substituted alkyl group, or tertiary alkyl group such as dimethyl pentyl or t-butyl. These candidates can be evaluated using methods analogous to those described above.

[0643] Ester-based cleavable linking groups, which may be used in the linkers according to the present invention, are cleaved by enzymes such as esterases and amidases in cells. Examples of ester-based cleavable linking groups include but are not limited to esters of alkylene, alkenylene and alkynylene groups. Ester cleavable linking groups have the general formula —C(O)O—, or —OC(O)—. These candidates can be evaluated using methods analogous to those described above.

[0644] Peptide-based cleavable linking groups, which may be used according to the present invention, are cleaved by enzymes such as peptidases and proteases in cells. Peptide-based cleavable linking groups are peptide bonds formed between amino acids to yield oligopeptides (e.g., dipeptides, tripeptides etc.) and polypeptides. Peptide-based cleavable groups do not include the amide group (—C(O)NH—). The amide group can be formed between any alkylene, alkenylene or alkynylene. A peptide bond is a special type of amide bond formed between amino acids to yield peptides and proteins. The peptide based cleavage group is generally limited to the peptide bond (i.e., the amide bond) formed between amino acids yielding peptides and proteins and does not include the entire amide functional group. Peptide-based cleavable linking groups have the general formula-NHCHRAC(O)NHCHRBC(O)—, where R^{A} and R^{B} are the R groups of the two adjacent amino acids.

[0645] In some embodiments of any one of the aspects described herein, the linker is a hydrophobic linker. For example, the linker comprises aliphatic, cycloaliphatic, and/or aromatic moieties. In some embodiments, the linker is a hydrophilic linker. For example, the linker comprises polyethylene glycol, e.g., the linker is —(CH₂CH₂O)_{w}—, where w is an integer. In some embodiments, w is an integer between 1 and 1000. For example, w is an integer between 2 and 500, e.g., w is 5, 10, 15, 20, 25, 30, 35, 40, 50, 100, 150, 200, 250, 300, 350, 400 or 500.

### Oligonucleotide Modifications

[0646] In some embodiments of any one of the aspects, the oligonucleotide can comprise one or more, e.g., 1, 2, 3, 4, 5, 6, 7, 8 or more modified internucleoside linkages. For example, the oligonucleotide can comprise 1, 2, 3, 4, 5 or 6 modified internucleoside linkages. For example, the oligonucleotide comprises 1, 2, 3 or 4 modified internucleoside linkages. In some embodiments, the oligonucleotide comprises at least two modified internucleoside linkages between the first five nucleotides counting from the 5′-end of the oligonucleotide and further comprises at least two modified internucleoside linkages between the first five nucleotides counting from the 3′-end of the oligonucleotide. For example, the oligonucleotide comprises modified internucleoside linkages between nucleotides 1 and 2, and between nucleotides 2 and 3, counting from 5′-end of the oligonucleotide, and between nucleotides 1 and 2, and between nucleotides 2 and 3, counting from 3′-end of the oligonucleotide.

[0647] In some embodiments of any one of the aspects, the oligonucleotide comprises one or more, e.g., 1, 2, 3, 4, 5, 6, 7, 8 or more phosphorothioate internucleoside linkages. For example, the oligonucleotide comprises 1, 2, 3, 4, 5 or 6 phosphorothioate internucleoside linkages. For example, the oligonucleotide comprises 1, 2, 3 or 4 phosphorothioate internucleoside linkages. In some embodiments, the oligonucleotide comprises at least two phosphorothioate internucleoside linkages between the first five nucleotides counting from the 5′-end of the oligonucleotide and further comprises at least two phosphorothioate internucleoside linkages between the first five nucleotides counting from the 3′-end of the oligonucleotide. For example, the oligonucleotide comprises modified internucleoside linkages between nucleotides 1 and 2, and between nucleotides 2 and 3, counting from 5′-end of the oligonucleotide, and between nucleotides 1 and 2, and between nucleotides 2 and 3, counting from 3′-end of the oligonucleotide.

[0648] In some embodiments of any one of the aspects described herein, the oligonucleotide further comprises, i.e., in addition to a nucleotiside of Formula (II), a nucleoside with a modified sugar. By a “modified sugar” is meant a sugar or moiety other than 2′-deoxy (i.e, 2′-H) or 2′-OH ribose sugar. Some exemplary nucleotides comprising a modified sugar are 2′-F ribose, 2′-OMe ribose, 2′-0,4′-C-methylene ribose (locked nucleic acid, LNA), anhydrohexitol (1,5-anhydrohexitol nucleic acid, HNA), cyclohexene (Cyclohexene nucleic acid, CeNA), 2′-methoxyethyl ribose, 2′-O-allyl ribose, 2′-C-allyl ribose, 2′-O—N-methylacetamido (2′-O-NMA) ribose, a 2′-O-dimethylaminoethoxyethyl (2′-O-DMAEOE) ribose, 2′-O-aminopropyl (2′-O-AP) ribose, 2′-F arabinose (2′-ara-F), threose (Threose nucleic acid, TNA), and 2,3-dihydroxylpropyl (glycol nucleic acid, GNA). It is noted that the nucleoside with the modified sugar can be present at any position of the oligonucleotide.

[0649] In some embodiments, the oligonucleotide further comprises at least one, e.g., 1, 2, 3, 4, 5, 6, 7, 8, 9, 10 or more 2′-fluoro (2′-F) nucleotides. For example, the oligonucleotide can comprise 1, 2, 3, 4, 5, 6, 7, 8, 9 or 10 2′—F nucleotides. It is noted that the 2′-F nucleotides can be present at any position of the oligonucleotide.

[0650] In some embodiments, the oligonucleotide comprises, e.g., solely comprises nucleosides of Formula (II), and 2′-F nucleosides.

[0651] In some embodiments, the oligonucleotide further comprises at least one, e.g., 1, 2, 3, 4, 5, 6, 7, 8, 9, 10 or more 2′-OMe nucleotides. For example, the oligonucleotide can comprise 1, 2, 3, 4, 5, 6, 7, 8, 9 or 10 2′—OMe nucleotides. It is noted that the 2′-OMe nucleotides can be present at any position of the oligonucleotide.

[0652] In some embodiments, the oligonucleotide comprises, e.g., solely comprises solely comprises nucleosides of Formula (II), and 2′-OMe nucleosides. In some other embodiments, the oligonucleotide comprises, e.g., solely comprises nucleosides of Formula (II), 2′-OMe nucleosides and 2′-F nucleosides.

[0653] In some embodiments, the oligonucleotide further comprises at least one, e.g., 1, 2, 3, 4, 5, 6, 7, 8, 9, 10 or more 2′-deoxy, e.g., 2′-H nucleotides. For example, the oligonucleotide can comprise 1, 2, 3, 4, 5, 6, 7, 8, 9 or 10 of 2′-deoxy, e.g., 2′-H nucleotides. It is noted that the 2′-deoxy, e.g., 2′-H nucleotides can be present at any position of the oligonucleotide. For example, the oligonucleotide can comprise a 2′-deoxy, e.g., 2′-H nucleotide at 1, 2, 3, 4, 5 or 6 of positions 2, 5, 7, 12, 14 and 16, counting from 5′-end of the oligonucleotide. In some embodiments, the oligonucleotide comprises a 2′-deoxy nucleotide at positions 5 and 7, counting from 5′-end of the oligonucleotide.

[0654] In some embodiments, the oligonucleotide comprises, e.g., solely comprises nucleosides of Formula (II), and 2′-deoxy (2′-H) nucleotides. In some embodiments, the oligonucleotide comprises, e.g., solely comprises nucleosides of Formula (II), 2′-OMe nucleosides, and 2′-deoxy (2′-H) nucleotides. In some embodiments, the oligonucleotide comprises, e.g., solely comprises nucleosides of Formula (II), 2′-F nucleosides and 2′-deoxy (2′-H) nucleotides. In some embodiments, the oligonucleotide comprises, e.g., solely comprises nucleosides of Formula (II), 2′-OMe nucleosides, 2′-F nucleosides and 2′-deoxy (2′-H) nucleotides.

[0655] In some embodiments of any one of the aspects described herein, the oligonucleotide further comprises, i.e., in addition to a nucleoside of Formula (II), a non-natural nucleobase. In some embodiments, the oligonucleotide can comprise one or more, e.g., 1, 2, 3, 4, 5, 6, 7, 8, 9, 10 or more nucleotides comprising an independently selected non-natural nucleobase. When present, a nucleotide comprising a non-natural nucleobase can be present anywhere in the oligonucleotide.

[0656] In some embodiments, the oligonucleotide further comprises a solid support linked thereto.

[0657] The oligonucleotides described herein can range from few nucleotides (e.g., 2, 3, 4, 5, 6, 7, 8, 9 or 10 nucleotides) in length to hundreds of nucleotides in length. For example, the oligonucleotide can be from 5 nucleotides to 100 nucleotides in length. In some embodiments, the oligonucleotide is from 10 nucleotides to 50 nucleotides in length. For example, the oligonucleotide is between 15 and 35, more generally between 18 and 25, yet more generally between 19 and 24, and most generally between 19 and 21 base pairs in length. In some embodiments, longer oligonucleotides of between 25 and 30 nucleotides in length are preferred. In some embodiments, shorter oligonucleotides of between 10 and 15 nucleotides in length are preferred. In another embodiment, the oligonucleotide is at least 21 nucleotides in length.

[0658] In some embodiments of any one of the aspects, the oligonucleotide described herein can comprise a thermally destabilizing modification. For example, the oligonucleotide can comprise at least one thermally destabilizing modification of the duplex within the first 9 nucleotide positions, counting from the 5′-end of the oligonucleotide. In some embodiments, the thermally destabilizing modification is located at position 2, 3, 4, 5, 6, 7, 8 or 9, counting from the 5′-end of the antisense strand. In some embodiments, thermally destabilizing modification is located in positions 2-9, or preferably positions 4-8, counting from the 5′-end of the oligonucleotide. In some further embodiments, the thermally destabilizing modification is located at position 5, 6, 7 or 8, counting from the 5′-end of the oligonucleotide. In still some further embodiments, the thermally destabilizing modification is located at position 7, counting from the 5′-end of the oligonucleotide.

[0659] In some embodiments of any one of the aspects described herein, the oligonucleotide can comprise one or more stabilizing modifications. For example, the oligonucleotide can comprise at least two (e.g., two, three, four, five, six, seven, eight, nine, ten or more) stabilizing modifications.

[0660] In some embodiments, the oligonucleotide comprises at least two (e.g., two, three, four, five, six, seven, eight, nine, ten or more) stabilizing modifications. Without limitations, a stabilizing modification in the oligonucleotide can be present at any positions. In some embodiments, the oligonucleotide comprises stabilizing modifications at positions 2, 6, 8, 9, 14 and 16, counting from the 5′-end. In some other embodiments, the oligonucleotide comprises stabilizing modifications at positions 2, 6, 14 and 16, counting from the 5′-end. In still some other embodiments, the oligonucleotide comprises stabilizing modifications at positions 2, 14 and 16, counting from the 5′-end. In some embodiments, the oligonucleotide comprises stabilizing modifications at positions 7, 10 and 11, counting from the 5′-end. In some other embodiments, the oligonucleotide comprises stabilizing modifications at positions 7, 9, 10 and 11, counting from the 5′-end.

[0661] In some embodiments, the oligonucleotide comprises at least one stabilizing modification adjacent to a destabilizing modification. For example, the stabilizing modification can be the nucleotide at the 5′-end or the 3′-end of the destabilizing modification, i.e., at position-1 or +1 from the position of the destabilizing modification. In some embodiments, the oligonucleotide comprises a stabilizing modification at each of the 5′-end and the 3′-end of the destabilizing modification, i.e., positions-1 and +1 from the position of the destabilizing modification. In some embodiments, the oligonucleotide comprises at least two stabilizing modifications at the 3′-end of a destabilizing modification.

### Methods of Inhibiting Expression of a Target Gene

[0662] In another aspect, the disclosure provides methods of using the oligonucleotides and dsNRAs described herein. For example, provided herein is a method for inhibiting the expression of a target gene in a cell. The method comprising administering to said cell a dsRNA molecule or oligonucleotide described herein, where the antisense strand or the oligonucleotide comprises a nucleotide sequence substantially complementary to a nucleotide sequence of the target gene. It is noted that administering to the cell can be in vitro or in vivo. Accordingly, the present disclosure further relates to a use of a dsRNA molecule or oligonucleotide described herein for inhibiting expression of a target gene in a target cell in vitro. When the cell is in vivo, the method comprises administering to a subject in an amount sufficient to inhibit expression of the target gene a double-stranded RNA or oligonucleotide described herein, where the antisense strand or the oligonucleotide comprises a nucleotide sequence substantially complementary to a nucleotide sequence of a target gene. In some embodiments, the subject has or has been diagnosed with a disease or disorder.

[0663] The target gene can be any desired RNA molecule, including, but not limited to, messenger RNA (mRNA), transfer RNA (tRNA), ribosomal RNA (rRNA) and microRNA (miRNA). In some preferred embodiments, the target gene is a mRNA. In some embodiments, the target nucleic acid comprises a nucleotide sequence associated with a disease or disorder.

[0664] In some embodiments, the target gene is selected from the group consisting of Factor VII, Eg5, PCSK9, TPX2, apoB, SAA, TTR, RSV, PDGF beta gene, Erb-B gene, Src gene, CRK gene, GRB2 gene, RAS gene, MEKK gene, JNK gene, RAF gene, Erk1/2 gene, PCNA (p21) gene, MYB gene, JUN gene, FOS gene, BCL-2 gene, hepcidin, Activated Protein C, Cyclin D gene, VEGF gene, EGFR gene, Cyclin A gene, Cyclin E gene, WNT-1 gene, beta-catenin gene, c-MET gene, PKC gene, NFKB gene, STAT3 gene, survivin gene, Her2/Neu gene, topoisomerase I gene, topoisomerase II alpha gene, mutations in the p73 gene, mutations in the p21 (WAF1/CIP1) gene, mutations in the p27 (KIP1) gene, mutations in the PPMID gene, mutations in the RAS gene, mutations in the caveolin I gene, mutations in the MIB I gene, mutations in the MTAI gene, mutations in the M68 gene, mutations in tumor suppressor genes, and mutations in the p53 tumor suppressor gene.

### Cells

[0665] The disclosure also provides a cell comprising a dsRNA or oligonucleotide described herein. As used herein, the term “cell” refers to a single cell as well as to a population of (i.e., more than one) cells.

### Kits

[0666] A dsRNA or oligonucleotide described herein can be provided in a kit, e.g., as a component of a kit. For example, the kit includes (a) a dsRNA or oligonucleotide described herein, and optionally (b) informational material. The informational material can be descriptive, instructional, marketing, or other material that relates to the methods described herein and/or the use of a dsRNA or oligonucleotide described herein for the methods described herein. The informational material of the kits is not limited in its form. In some embodiments, the informational material can include information about production of the dsRNAs or oligonucleotides, their molecular weight, concentration, date of expiration, batch, or production site information, and so forth. In some embodiments, the informational material relates to using dsRNA or oligonucleotide to treat, prevent, or diagnosis of disorders and conditions.

[0667] In some embodiments, the informational material can include instructions to administer the dsRNA or oligonucleotide in a suitable manner to perform the methods described herein, e.g., in a suitable dose, dosage form, or mode of administration (e.g., a dose, dosage form, or mode of administration described herein). In another embodiment, the informational material can include instructions to administer the dsRNA or oligonucleotide to a suitable subject, e.g., a human, e.g., a human having, or at risk for, a disorder or condition needing treatment.

[0668] The informational material of the kits is not limited in its form. In many cases, the informational material, e.g., instructions, is provided in print but can also be in other formats, such as computer readable material.

[0669] Components of the kit, e.g., the dsRNA or oligonucleotide can be provided in any form, e.g., liquid, dried or lyophilized form. It is preferred that the dsRNA or oligonucleotide be substantially pure and/or sterile. When the dsRNA or oligonucleotide is provided in a liquid solution, the liquid solution preferably is an aqueous solution, with a sterile aqueous solution being preferred. When the dsRNA or oligonucleotide is provided as a dried form, reconstitution generally is by the addition of a suitable solvent. The solvent, e.g., sterile water or buffer, can optionally be provided in the kit.

[0670] The kit can include one or more containers for the components of the kit. In some embodiments, the kit contains separate containers, dividers, or compartments for the different components of the kit. For example, the dsRNA or oligonucleotide can be contained in a bottle, vial, or syringe, and the informational material can be contained association with the container. In other embodiments, the separate elements of the kit are contained within a single, undivided container. For example, the dsRNA or oligonucleotide is contained in a bottle, vial or syringe that has attached thereto the informational material in the form of a label. In some embodiments, the kit includes a plurality (e.g., a pack) of individual containers, each containing one or more-unit dosage forms of the dsRNA or oligonucleotide. For example, the kit includes a plurality of syringes, ampules, foil packets, or blister packs, each containing a single unit dose of the dsRNA or oligonucleotide. The containers of the kits can be airtight, waterproof (e.g., impermeable to changes in moisture or evaporation), and/or light-tight.

[0671] The kit optionally includes a device suitable for administration of the dsRNA or oligonucleotide, e.g., a syringe, inhalant, dropper (e.g., eye dropper), swab (e.g., a cotton swab or wooden swab), or any such delivery device. In some embodiments, the device is an implantable device that dispenses metered doses of the dsRNA or oligonucleotide. The disclosure also features a method of providing a kit, e.g., by combining components described herein.

[0672] In some embodiments, the kit can further comprise additional components and/or reagents for practicing the methods described herein using the dsRNA or oligonucleotide described herein.

### Compositions

[0673] The dsRNA or oligonucleotide described herein can be formulated in compositions. For example, the dsRNA or oligonucleotide described herein can be formulated into pharmaceutical compositions for therapeutic use. Accordingly, in another aspect, the invention provides a pharmaceutical composition comprising a dsRNA or oligonucleotide described herein. Pharmaceutically acceptable compositions comprise a therapeutically-effective amount of one or more of the dsRNA or oligonucleotide described herein, taken alone, or formulated together with one or more pharmaceutically acceptable carriers (additives), excipient and/or diluents.

[0674] The pharmaceutical compositions can be specially formulated for administration in solid or liquid form, including those adapted for the following: (1) oral administration, for example, drenches (aqueous or non-aqueous solutions or suspensions), tablets, e.g., those targeted for buccal, sublingual, and systemic absorption, boluses, powders, granules, pastes for application to the tongue; (2) parenteral administration, for example, by subcutaneous, intramuscular, intravenous or epidural injection as, for example, a sterile solution or suspension, or sustained-release formulation; (3) topical application, for example, as a cream, ointment, or a controlled-release patch or spray applied to the skin; (4) intravaginally or intrarectally, for example, as a pessary, cream or foam; (5) sublingually; (6) ocularly; (7) transdermally; or (8) nasally. Delivery using subcutaneous or intravenous methods can be particularly advantageous.

[0675] The phrase “therapeutically-effective amount” as used herein means that amount of a compound, material, or composition comprising a conjugate described herein which is effective for producing some desired therapeutic effect in at least a sub-population of cells in an animal at a reasonable benefit/risk ratio applicable to any medical treatment.

[0676] The phrase “pharmaceutically acceptable” is employed herein to refer to those compounds, materials, compositions, and/or dosage forms which are, within the scope of sound medical judgment, suitable for use in contact with the tissues of human beings and animals without excessive toxicity, irritation, allergic response, or other problem or complication, commensurate with a reasonable benefit/risk ratio.

[0677] The phrase “pharmaceutically acceptable carrier” as used herein means a pharmaceutically-acceptable material, composition, or vehicle, such as a liquid or solid filler, diluent, excipient, manufacturing aid (e.g., lubricant, talc magnesium, calcium or zinc stearate, or steric acid), or solvent encapsulating material, involved in carrying or transporting the subject compound from one organ, or portion of the body, to another organ, or portion of the body. Each carrier must be “acceptable” in the sense of being compatible with the other ingredients of the formulation and not injurious to the patient. Some examples of materials which can serve as pharmaceutically acceptable carriers include: (1) sugars, such as lactose, glucose and sucrose; (2) starches, such as corn starch and potato starch; (3) cellulose, and its derivatives, such as sodium carboxymethyl cellulose, ethyl cellulose and cellulose acetate; (4) powdered tragacanth; (5) malt; (6) gelatin; (7) lubricating agents, such as magnesium state, sodium lauryl sulfate and talc; (8) excipients, such as cocoa butter and suppository waxes; (9) oils, such as peanut oil, cottonseed oil, safflower oil, sesame oil, olive oil, corn oil and soybean oil; (10) glycols, such as propylene glycol; (11) polyols, such as glycerin, sorbitol, mannitol and polyethylene glycol; (12) esters, such as ethyl oleate and ethyl laurate; (13) agar; (14) buffering agents, such as magnesium hydroxide and aluminum hydroxide; (15) alginic acid; (16) pyrogen-free water; (17) isotonic saline; (18)Ringer's solution; (19) ethyl alcohol; (20) pH buffered solutions; (21) polyesters, polycarbonates and/or polyanhydrides; (22) bulking agents, such as polypeptides and amino acids (23) serum component, such as serum albumin, HDL and LDL; and (22) other non-toxic compatible substances employed in pharmaceutical formulations.

[0678] As used herein, a “pharmaceutically acceptable carrier” is intended to include any and all solvents, dispersion media, coatings, antibacterial and antifungal agents, isotonic and absorption delaying agents, and the like, compatible with pharmaceutical administration. The use of such media and agents for pharmaceutically active substances is well known in the art. Except insofar as any conventional media or agent is incompatible with the active compound, use thereof in the compositions is contemplated. Supplementary active compounds can also be incorporated into the compositions. Pharmaceutical carriers include sterile aqueous solutions or dispersions and sterile powders for the extemporaneous preparation of sterile injectable solutions or dispersion. The use of such media and agents for pharmaceutically active substances is known in the art.

[0679] The formulations can conveniently be presented in unit dosage form and can be prepared by any methods well known in the art of pharmacy. The amount of active ingredient which can be combined with a carrier material to produce a single dosage form will vary depending upon the host being treated, the particular mode of administration. The amount of active ingredient which can be combined with a carrier material to produce a single dosage form will generally be that amount of the compound which produces a therapeutic effect. Generally, out of one hundred percent, this amount will range from about 0.1 percent to about ninety-nine percent of active ingredient, preferably from about 5 percent to about 70 percent, most preferably from about 10 percent to about 30 percent.

[0680] Pharmaceutical compositions for use with the methods described herein can be formulated in a conventional manner using one or more physiologically acceptable carriers or excipients. For example, a dsRNA or oligonucleotide described herein can be formulated for administration by, for example, by aerosol, intravenous, oral, or topical route. The compositions can be formulated for intralesional, intratumoral, intraperitoneal, subcutaneous, intramuscular, or intravenous injection; infusion; liposome-mediated delivery; topical, intrathecal, gingival pocket, per rectum, intrabronchial, nasal, transmucosal, intestinal, oral, ocular, or otic delivery.

[0681] Techniques and formulations generally can be found in Remington's Pharmaceutical Sciences, Meade Publishing Co., Easton, PA. For systemic administration, injection is preferred, including intramuscular, intravenous, intraperitoneal, and subcutaneous. For injection, a dsRNA described herein can be formulated in liquid solutions, preferably in physiologically compatible buffers such as Hank's solution or Ringer's solution. In addition, the dsRNA can be formulated in solid form and redissolved or suspended immediately prior to use. Lyophilized forms are also included.

[0682] For oral administration, the pharmaceutical composition can take the form of, for example, tablets or capsules prepared by conventional means with pharmaceutically acceptable excipients such as binding agents (e.g., pregelatinized maize starch, polyvinylpyrrolidone or hydroxypropyl methylcellulose); fillers (e.g., lactose, microcrystalline cellulose or calcium hydrogen phosphate); lubricants (e.g., magnesium stearate, talc or silica); disintegrants (e.g., potato starch or sodium starch glycolate); or wetting agents (e.g., sodium lauryl sulphate). The tablets can be coated by methods well known in the art. Liquid preparations for oral administration can take the form of, for example, solutions, syrups, or suspensions, or they may be presented as a dry product for constitution with water or other suitable vehicle before use. Such liquid preparations can be prepared by conventional means with pharmaceutically acceptable additives such as suspending agents (e.g., sorbitol syrup, cellulose derivatives, or hydrogenated edible fats); emulsifying agents (e.g., lecithin or acacia); non-aqueous vehicles (e.g., pharmaceutically acceptable oils, oily esters, ethyl alcohol or fractionated vegetable oils); and preservatives (e.g., methyl or propyl-p-hydroxybenzoates or sorbic acid). The preparations can also contain buffer salts, flavoring, coloring, and sweetening agents as appropriate.

[0683] Preparations for oral administration can be suitably formulated to give controlled release of the active compound. For buccal administration the compositions can take the form of tablets or lozenges formulated in conventional manner. For administration by inhalation, the compounds for use as described herein are conveniently delivered in the form of an aerosol spray presentation from pressurized packs or a nebulizer, with the use of a suitable propellant, e.g., dichlorodifluoromethane, trichlorofluoromethane, dichlorotetrafluoroethane, carbon dioxide or other suitable gas. In the case of a pressurized aerosol the dosage unit can be determined by providing a valve to deliver a metered amount. Capsules and cartridges of e.g., gelatin for use in an inhaler or insufflator can be formulated containing a powder mix of the compound and a suitable powder base such as lactose or starch.

[0684] The dsRNA or oligonucleotide can be formulated for parenteral administration by injection, e.g., by bolus injection or continuous infusion. Formulations for injection can be presented in unit dosage form, e.g., in ampoules or in multi-dose containers, with an added preservative. The compositions can take such forms as suspensions, solutions, or emulsions in oily or aqueous vehicles, and can contain formulatory agents such as suspending, stabilizing and/or dispersing agents. Alternatively, the active ingredient can be in powder form for constitution with a suitable vehicle, e.g., sterile pyrogen-free water, before use.

[0685] In addition to the formulations described previously, the dsRNA or oligonucleotide can also be formulated as a depot preparation. Such long-acting formulations can be administered by implantation (for example subcutaneously or intramuscularly) or by intramuscular injection. Thus, for example, dsRNAs or oligonucleotides can be formulated with suitable polymeric or hydrophobic materials (for example as an emulsion in an acceptable oil) or ion exchange resins, or as sparingly soluble derivatives, for example, as a sparingly soluble salt.

[0686] Systemic administration can also be by transmucosal or transdermal means. For transmucosal or transdermal administration, penetrants appropriate to the barrier to be permeated are used in the formulation. Such penetrants are generally known in the art, and include, for example, for transmucosal administration bile salts and fusidic acid derivatives. In addition, detergents can be used to facilitate permeation. Transmucosal administration can be through nasal sprays or using suppositories. For topical administration, dsRNA can be formulated into ointments, salves, gels, or creams as generally known in the art. A wash solution can be used locally to treat an injury or inflammation to accelerate healing.

[0687] The compositions can, if desired, be presented in a pack or dispenser device which can contain one or more-unit dosage forms containing the active ingredient. The pack can for example comprise metal or plastic foil, such as a blister pack. The pack or dispenser device can be accompanied by instructions for administration.

### Liposomes and Lipid Formulations

[0688] The dsRNAs or oligonucleotides described herein can be formulated for delivery in a membranous molecular assembly, e.g., a liposome or a micelle. As used herein, the term “liposome” refers to a vesicle composed of amphiphilic lipids arranged in at least one bilayer, e.g., one bilayer or a plurality of bilayers. Liposomes include unilamellar and multilamellar vesicles that have a membrane formed from a lipophilic material and an aqueous interior. The aqueous portion contains the dsRNA or oligonucleotide. The lipophilic material isolates the aqueous interior from an aqueous exterior, which typically does not include the dsRNA or oligonucleotide, although in some examples, it may. Liposomes are useful for the transfer and delivery of active ingredients to the site of action. Because the liposomal membrane is structurally similar to biological membranes, when liposomes are applied to a tissue, the liposomal bilayer fuses with bilayer of the cellular membranes. As the merging of the liposome and cell progresses, the internal aqueous contents that include a dsRNA or oligonucleotide described herein are delivered into the cell. In some cases, the liposomes are also specifically targeted, e.g., to direct the conjugate to particular cell types.

[0689] A liposome containing a dsRNA or oligonucleotide described herein can be prepared by a variety of methods. In one example, the lipid component of a liposome is dissolved in a detergent so that micelles are formed with the lipid component. For example, the lipid component can be an amphipathic cationic lipid or lipid conjugate. The detergent can have a high critical micelle concentration and may be nonionic. Exemplary detergents include cholate, CHAPS, octylglucoside, deoxycholate, and lauroyl sarcosine. The dsRNA is then added to the micelles that include the lipid component. After condensation, the detergent is removed, e.g., by dialysis, to yield a liposomal preparation.

[0690] If necessary, a carrier compound that assists in condensation can be added during the condensation reaction, e.g., by controlled addition. For example, the carrier compound can be a polymer other than a nucleic acid (e.g., spermine or spermidine). pH can also be adjusted to favor condensation.

[0691] Further description of methods for producing stable polynucleotide or oligonucleotide delivery vehicles, which incorporate a polynucleotide/cationic lipid complex as structural components of the delivery vehicle, are described in, e.g., WO 96/37194. Liposome formation can also include one or more aspects of exemplary methods described in Felgner, P. L. et al., Proc. Natl. Acad. Sci., USA 8:7413-7417, 1987; U.S. Pat. Nos. 4,897,355; 5,171,678; Bangham, et al. M. Mol. Biol. 23:238, 1965; Olson, et al. Biochim. Biophys. Acta 557:9, 1979; Szoka, et al. Proc. Natl. Acad. Sci. 75:4194, 1978; Mayhew, et al. Biochim. Biophys. Acta 775:169, 1984; Kim, et al. Biochim. Biophys. Acta 728:339, 1983; and Fukunaga, et al. Endocrinol. 115:757, 1984, which are incorporated by reference in their entirety. Commonly used techniques for preparing lipid aggregates of appropriate size for use as delivery vehicles include sonication and freeze-thaw plus extrusion (see, e.g., Mayer, et al. Biochim. Biophys. Acta 858:161, 1986, which is incorporated by reference in its entirety). Microfluidization can be used when consistently small (50 to 200 nm) and relatively uniform aggregates are desired (Mayhew, et al. Biochim. Biophys. Acta 775:169, 1984, which is incorporated by reference in its entirety).

[0692] Liposomes that are pH-sensitive or negatively-charged entrap nucleic acid molecules rather than complex with them. Since both the nucleic acid molecules and the lipid are similarly charged, repulsion rather than complex formation occurs. Nevertheless, some nucleic acid molecules are entrapped within the aqueous interior of these liposomes. pH-sensitive liposomes have been used to deliver DNA encoding the thymidine kinase gene to cell monolayers in culture. Expression of the exogenous gene was detected in the target cells (Zhou et al., Journal of Controlled Release, 19, (1992)₂₆₉-274, which is incorporated by reference in its entirety).

[0693] One major type of liposomal composition includes phospholipids other than naturally-derived phosphatidylcholine. Neutral liposome compositions, for example, can be formed from dimyristoyl phosphatidylcholine (DMPC) or dipalmitoyl phosphatidylcholine (DPPC). Anionic liposome compositions generally are formed from dimyristoyl phosphatidylglycerol, while anionic fusogenic liposomes are formed primarily from dioleoyl phosphatidylethanolamine (DOPE). Another type of liposomal composition is formed from phosphatidylcholine (PC) such as, for example, soybean PC, and egg PC. Another type is formed from mixtures of phospholipid and/or phosphatidylcholine and/or cholesterol.

[0694] Examples of other methods to introduce liposomes into cells in vitro and include U.S. Pat. Nos. 5,283,185; 5,171,678; WO 94/00569; WO 93/24640; WO 91/16024; Felgner, J. Biol. Chem. 269:2550, 1994; Nabel, Proc. Natl. Acad. Sci. 90:11307, 1993; Nabel, Human Gene Ther. 3:649, 1992; Gershon, Biochem. 32:7143, 1993; and Strauss EMBO J. 11:417, 1992.

[0695] In some embodiments, cationic liposomes are used. Cationic liposomes possess the advantage of being able to fuse to the cell membrane.

[0696] Further advantages of liposomes include, but are not limited to, liposomes obtained from natural phospholipids are biocompatible and biodegradable; liposomes can incorporate a wide range of water and lipid soluble drugs; liposomes can protect encapsulated dsRNAs in their internal compartments from metabolism and degradation (Rosoff, in “Pharmaceutical Dosage Forms,” Lieberman, Rieger and Banker (Eds.), 1988, volume 1, p. 245). Important considerations in the preparation of liposome formulations are the lipid surface charge, vesicle size and the aqueous volume of the liposomes.

[0697] A positively charged synthetic cationic lipid, N-[1-(2,3-dioleyloxy) propyl]-N,N,N-trimethylammonium chloride (DOTMA) can be used to form small liposomes that interact spontaneously with nucleic acid to form lipid-nucleic acid complexes which are capable of fusing with the negatively charged lipids of the cell membranes of tissue culture cells.

[0698] A DOTMA analogue, 1,2-bis(oleoyloxy)-3-(trimethylammonium) propane (DOTAP) can be used in combination with a phospholipid to form DNA-complexing vesicles. Lipofectin™ Bethesda Research Laboratories, Gaithersburg, Md.) is an effective agent for the delivery of highly anionic nucleic acids into living tissue culture cells that comprise positively charged DOTMA liposomes which interact spontaneously with negatively charged polynucleotides to form complexes. When enough positively charged liposomes are used, the net charge on the resulting complexes is also positive. Positively charged complexes prepared in this way spontaneously attach to negatively charged cell surfaces, fuse with the plasma membrane, and efficiently deliver functional nucleic acids into, for example, tissue culture cells. Another commercially available cationic lipid, 1,2-bis(oleoyloxy)-3,3-(trimethylammonium) propane (“DOTAP”) (Boehringer Mannheim, Indianapolis, Indiana) differs from DOTMA in that the oleoyl moieties are linked by ester, rather than ether linkages.

[0699] Other reported cationic lipid compounds include those that have been conjugated to a variety of moieties including, for example, carboxyspermine which has been conjugated to one of two types of lipids and includes compounds such as 5-carboxyspermylglycine dioctaoleoylamide (“DOGS”) (Transfectam™, Promega, Madison, Wisconsin) and dipalmitoylphosphatidylethanolamine 5-carboxyspermyl-amide (“DPPES”) (see, e.g., U.S. Pat. No. 5,171,678).

[0700] Another cationic lipid conjugate includes derivatization of the lipid with cholesterol (“DC-Chol”) which has been formulated into liposomes in combination with DOPE (See, Gao, X. and Huang, L., Biochim. Biophys. Res. Commun. 179:280, 1991). Lipopolylysine, made by conjugating polylysine to DOPE, has been reported to be effective for transfection in the presence of serum (Zhou, X. et al., Biochim. Biophys. Acta 1065:8, 1991, which is incorporated by reference in its entirety). For certain cell lines, these liposomes containing conjugated cationic lipids, are said to exhibit lower toxicity and provide more efficient transfection than the DOTMA-containing compositions. Other commercially available cationic lipid products include DMRIE and DMRIE-HP (Vical, La Jolla, California) and Lipofectamine (DOSPA) (Life Technology, Inc., Gaithersburg, Maryland). Other cationic lipids suitable for the delivery of oligonucleotides are described in WO 98/39359 and WO 96/37194.

[0701] Liposomal formulations are particularly suited for topical administration. Liposomes present several advantages over other formulations. Such advantages include reduced side effects related to high systemic absorption of the administered drug, increased accumulation of the administered drug at the desired target, and the ability to administer the dsRNA, into the skin. In some implementations, liposomes are used for delivering dsRNA to epidermal cells and also to enhance the penetration of dsRNA into dermal tissues, e.g., into skin. For example, the liposomes can be applied topically. Topical delivery of drugs formulated as liposomes to the skin has been documented (see, e.g., Weiner et al., Journal of Drug Targeting, 1992, vol. 2,405-410 and du Plessis et al., Antiviral Research, 18, 1992, 259-265; Mannino, R. J. and Fould-Fogerite, S., Biotechniques 6:682-690, 1988; Itani, T. et al. Gene 56:267-276. 1987; Nicolau, C. et al. Meth. Enz. 149:157-176, 1987; Straubinger, R. M. and Papahadjopoulos, D. Meth. Enz. 101:512-527, 1983; Wang, C. Y. and Huang, L., Proc. Natl. Acad. Sci. USA 84:7851-7855, 1987, which are incorporated by reference in their entirety).

[0702] Non-ionic liposomal systems have also been examined to determine their utility in the delivery of drugs to the skin, in particular systems comprising non-ionic surfactant and cholesterol. Non-ionic liposomal formulations comprising Novasome I (glyceryl dilaurate/cholesterol/polyoxyethylene-10-stearyl ether) and Novasome II (glyceryl distearate/cholesterol/polyoxyethylene-10-stearyl ether) were used to deliver a drug into the dermis of mouse skin.

[0703] Liposomes that include a dsRNA or oligonucleotide described herein can be made highly deformable. Such deformability can enable the liposomes to penetrate through pore that are smaller than the average radius of the liposome. For example, transfersomes are a type of deformable liposomes. Transfersomes can be made by adding surface edge activators, usually surfactants, to a standard liposomal composition. Transfersomes that include dsRNA or oligonucleotide can be delivered, for example, subcutaneously by infection. In order to cross intact mammalian skin, lipid vesicles must pass through a series of fine pores, each with a diameter less than 50 nm, under the influence of a suitable transdermal gradient. In addition, due to the lipid properties, these transfersomes can be self-optimizing (adaptive to the shape of pores, e.g., in the skin), self-repairing, and can frequently reach their targets without fragmenting, and often self-loading.

[0704] Other formulations amenable to the present invention are described in U.S. provisional application Ser. No. 61/018,616, filed Jan. 2, 2008; 61/018,611, filed Jan. 2, 2008; 61/039,748, filed Mar. 26, 2008; 61/047,087, filed Apr. 22, 2008, and 61/051,528, filed May 8, 2008. PCT application no PCT/US2007/080331, filed Oct. 3, 2007, also describes formulations that are amenable to the present invention.

[0705] Surfactants. Surfactants find wide application in formulations such as emulsions (including microemulsions) and liposomes (see above). A conjugate formulation can include a surfactant. In some embodiments, a conjugate described herein is formulated as an emulsion that includes a surfactant. The most common way of classifying and ranking the properties of the many different types of surfactants, both natural and synthetic, is by the use of the hydrophile/lipophile balance (HLB). The nature of the hydrophilic group provides the most useful means for categorizing the different surfactants used in formulations (Rieger, in “Pharmaceutical Dosage Forms,” Marcel Dekker, Inc., New York, NY, 1988, p. 285).

[0706] If the surfactant molecule is not ionized, it is classified as a nonionic surfactant. Nonionic surfactants find wide application in pharmaceutical products and are usable over a wide range of pH values. In general, their HLB values range from 2 to about 18 depending on their structure. Nonionic surfactants include nonionic esters such as ethylene glycol esters, propylene glycol esters, glyceryl esters, polyglyceryl esters, sorbitan esters, sucrose esters, and ethoxylated esters. Nonionic alkanolamides and ethers such as fatty alcohol ethoxylates, propoxylated alcohols, and ethoxylated/propoxylated block polymers are also included in this class. The polyoxyethylene surfactants are the most popular members of the nonionic surfactant class.

[0707] If the surfactant molecule carries a negative charge when it is dissolved or dispersed in water, the surfactant is classified as anionic. Anionic surfactants include carboxylates such as soaps, acyl lactylates, acyl amides of amino acids, esters of sulfuric acid such as alkyl sulfates and ethoxylated alkyl sulfates, sulfonates such as alkyl benzene sulfonates, acyl isethionates, acyl taurates and sulfosuccinates, and phosphates. The most important members of the anionic surfactant class are the alkyl sulfates and the soaps.

[0708] If the surfactant molecule carries a positive charge when it is dissolved or dispersed in water, the surfactant is classified as cationic. Cationic surfactants include quaternary ammonium salts and ethoxylated amines. The quaternary ammonium salts are the most used members of this class.

[0709] If the surfactant molecule has the ability to carry either a positive or negative charge, the surfactant is classified as amphoteric. Amphoteric surfactants include acrylic acid derivatives, substituted alkylamides, N-alkylbetaines and phosphatides.

[0710] The use of surfactants in drug products, formulations and in emulsions has been reviewed (Rieger, in “Pharmaceutical Dosage Forms,” Marcel Dekker, Inc., New York, NY, 1988, p. 285).

[0711] Micelles and other Membranous Formulations. Formulations comprising a conjugate described herein can be provided as a micellar formulation. “Micelles” are defined herein as a particular type of molecular assembly in which amphipathic molecules are arranged in a spherical structure such that all the hydrophobic portions of the molecules are directed inward, leaving the hydrophilic portions in contact with the surrounding aqueous phase. The converse arrangement exists if the environment is hydrophobic.

[0712] A mixed micellar formulation suitable for delivery through transdermal membranes may be prepared by mixing an aqueous solution of the dsRNA or oligonucleotide, an alkali metal C₈ to C₂₂ alkyl sulphate, and a micelle forming compounds. Exemplary micelle forming compounds include lecithin, hyaluronic acid, pharmaceutically acceptable salts of hyaluronic acid, glycolic acid, lactic acid, chamomile extract, cucumber extract, oleic acid, linoleic acid, linolenic acid, monoolein, monooleates, monolaurates, borage oil, evening of primrose oil, menthol, trihydroxy oxo cholanyl glycine and pharmaceutically acceptable salts thereof, glycerin, polyglycerin, lysine, polylysine, triolein, polyoxyethylene ethers and analogues thereof, polidocanol alkyl ethers and analogues thereof, chenodeoxycholate, deoxycholate, and mixtures thereof. The micelle forming compounds may be added at the same time or after addition of the alkali metal alkyl sulphate. Mixed micelles will form with substantially any kind of mixing of the ingredients but vigorous mixing in order to provide smaller size micelles.

[0713] In one method a first micellar composition is prepared which contains conjugate described herein and at least the alkali metal alkyl sulphate. The first micellar composition is then mixed with at least three micelle forming compounds to form a mixed micellar composition. In another method, the micellar composition is prepared by mixing conjugate described herein, the alkali metal alkyl sulphate and at least one of the micelle forming compounds, followed by addition of the remaining micelle forming compounds, with vigorous mixing.

[0714] Phenol and/or m-cresol may be added to the mixed micellar composition to stabilize the formulation and protect against bacterial growth. Alternatively, phenol and/or m-cresol may be added with the micelle forming ingredients. An isotonic agent such as glycerin may also be added after formation of the mixed micellar composition.

[0715] For delivery of the micellar formulation as a spray, the formulation can be put into an aerosol dispenser and the dispenser is charged with a propellant. The propellant, which is under pressure, is in liquid form in the dispenser. The ratios of the ingredients are adjusted so that the aqueous and propellant phases become one, i.e., there is one phase. If there are two phases, it is necessary to shake the dispenser prior to dispensing a portion of the contents, e.g., through a metered valve. The dispensed dose of pharmaceutical agent is propelled from the metered valve in a fine spray.

[0716] Propellants may include hydrogen-containing chlorofluorocarbons, hydrogen-containing fluorocarbons, dimethyl ether, and diethyl ether. In certain embodiments, HFA 134a (1,1,1,2 tetrafluoroethane) may be used.

[0717] The specific concentrations of the essential ingredients can be determined by relatively straightforward experimentation. For absorption through the oral cavities, it is often desirable to increase, e.g., at least double or triple, the dosage for through injection or administration through the gastrointestinal tract.

[0718] Particles. In some embodiments, conjugate described herein can be incorporated into a particle, e.g., a microparticle. Microparticles can be produced by spray-drying, but may also be produced by other methods including lyophilization, evaporation, fluid bed drying, vacuum drying, or a combination of these techniques.

[0719] Methods of preparing the formulations or compositions include the step of bringing into association an oligonucleotide and/or dsRNA with the carrier and, optionally, one or more accessory ingredients. In general, the formulations are prepared by uniformly and intimately bringing into association a compound of the present invention with liquid carriers, or finely divided solid carriers, or both, and then, if necessary, shaping the product.

[0720] In some cases, in order to prolong the effect of a drug, it is desirable to slow the absorption of the drug from subcutaneous or intramuscular injection. This may be accomplished by the use of a liquid suspension of crystalline or amorphous material having poor water solubility. The rate of absorption of the drug then depends upon its rate of dissolution which, in turn, may depend upon crystal size and crystalline form. Alternatively, delayed absorption of a parenterally-administered drug form is accomplished by dissolving or suspending the drug in an oil vehicle.

[0721] The oligonucleotide and/or dsRNA described herein may be formulated for administration in any convenient way for use in human or veterinary medicine, by analogy with other pharmaceuticals.

[0722] The oligonucleotide and/or dsRNA described herein or a pharmaceutical composition comprising an oligonucleotide and/or dsRNA described herein can be administered to a subject using different routes of delivery. A composition that includes an oligonucleotide and/or dsRNA described herein described herein can be delivered to a subject by a variety of routes. Exemplary routes include: intravenous, subcutaneous, topical, rectal, anal, vaginal, nasal, pulmonary, ocular.

[0723] The oligonucleotide and/or dsRNA described herein may be administered in a number of ways depending upon whether local or systemic treatment is desired and upon the area to be treated. Administration may be topical (including ophthalmic, vaginal, rectal, intranasal, transdermal), oral or parenteral. Parenteral administration includes intravenous drip, subcutaneous, intraperitoneal or intramuscular injection, or intrathecal or intraventricular administration.

[0724] The route and site of administration may be chosen to enhance targeting. For example, to target muscle cells, intramuscular injection into the muscles of interest would be a logical choice. Lung cells might be targeted by administering the oligonucleotide and/or dsRNA described herein in aerosol form. The vascular endothelial cells could be targeted by coating a balloon catheter with the oligonucleotide and/or dsRNA described herein and mechanically introducing the oligonucleotide and/or dsRNA described herein.

[0725] In one aspect, provided herein is a method of administering an oligonucleotide and/or dsRNA described herein, to a subject (e.g., a human subject). In another aspect, the present invention relates to an oligonucleotide and/or dsRNA described herein for use in inhibiting expression of a target gene in a subject. The method or the medical use includes administering a unit dose of the oligonucleotide and/or dsRNA described herein. In some embodiments, the unit dose is less than 10 mg per kg of bodyweight, or less than 10, 5, 2, 1, 0.5, 0.1, 0.05, 0.01, 0.005, 0.001, 0.0005, 0.0001, 0.00005 or 0.00001 mg per kg of bodyweight, and less than 200 nmole of RNA agent (e.g., about 4.4×10¹⁶ copies) per kg of bodyweight, or less than 1500, 750, 300, 150, 75, 15, 7.5, 1.5, 0.75, 0.15, 0.075, 0.015, 0.0075, 0.0015, 0.00075, 0.00015 nmole of oligonucleotide and/or dsRNA described herein per kg of bodyweight.

[0726] The defined amount can be an amount effective to treat or prevent a disease or disorder, e.g., a disease or disorder associated with the target gene. The unit dose, for example, can be administered by injection (e.g., intravenous, subcutaneous or intramuscular), an inhaled dose, or a topical application. In some embodiments dosages may be less than 10, 5, 2, 1, or 0.1 mg/kg of body weight.

[0727] In some embodiments, the unit dose is administered less frequently than once a day, e.g., less than every 2, 4, 8 or 30 days. In another embodiment, the unit dose is not administered with a frequency (e.g., not a regular frequency). For example, the unit dose may be administered a single time.

[0728] In some embodiments, the effective dose is administered with other traditional therapeutic modalities.

[0729] In some embodiments, a subject is administered an initial dose and one or more maintenance doses. The maintenance dose or doses can be the same or lower than the initial dose, e.g., one-half less of the initial dose. A maintenance regimen can include treating the subject with a dose or doses ranging from 0.01 μg to 15 mg/kg of body weight per day, e.g., 10, 1, 0.1, 0.01, 0.001, or 0.00001 mg per kg of bodyweight per day. The maintenance doses are, for example, administered no more than once every 2, 5, 10, or 30 days. Further, the treatment regimen may last for a period of time which will vary depending upon the nature of the particular disease, its severity and the overall condition of the patient. In certain embodiments the dosage may be delivered no more than once per day, e.g., no more than once per 24, 36, 48, or more hours, e.g., no more than once for every 5 or 8 days. Following treatment, the patient can be monitored for changes in his condition and for alleviation of the symptoms of the disease state. The dosage of the compound may either be increased in the event the patient does not respond significantly to current dosage levels, or the dose may be decreased if an alleviation of the symptoms of the disease state is observed, if the disease state has been ablated, or if undesired side-effects are observed.

[0730] The effective dose can be administered in a single dose or in two or more doses, as desired or considered appropriate under the specific circumstances. If desired to facilitate repeated or frequent infusions, implantation of a delivery device, e.g., a pump, semi-permanent stent (e.g., intravenous, intraperitoneal, intracisternal or intracapsular), or reservoir may be advisable.

[0731] In some embodiments, the composition includes a plurality of dsRNA or oligonucleotide species. In another embodiment, the dsRNA or oligonucleotide species has sequences that are non-overlapping and non-adjacent to another species with respect to a naturally occurring target sequence. In another embodiment, the plurality of dsRNA or oligonucleotide species is specific for different naturally occurring target genes. In another embodiment, the dsRNA molecule is allele specific.

[0732] The oligonucleotide and/or dsRNA described herein can be administered to mammals, particularly large mammals such as nonhuman primates or humans in a number of ways.

[0733] In some embodiments, the administration of the oligonucleotide and/or dsRNA composition described herein is parenteral, e.g., intravenous (e.g., as a bolus or as a diffusible infusion), intradermal, intraperitoneal, intramuscular, intrathecal, intraventricular, intracranial, subcutaneous, transmucosal, buccal, sublingual, endoscopic, rectal, oral, vaginal, topical, pulmonary, intranasal, urethral or ocular. Administration can be provided by the subject or by another person, e.g., a health care provider. The medication can be provided in measured doses or in a dispenser which delivers a metered dose.

[0734] In some embodiments, the administration of the oligonucleotide and/or dsRNA described herein is subcutaneous or intravenous administration.

### Oxygen Protecting Groups

[0735] Some embodiments of the various aspects described herein include an oxygen protecting group (also referred to as a hydroxyl protecting group herein). Oxygen protecting groups include, but are not limited to, —R^{OP1}, —N(R^{OP2})₂, —C(═O)SR^{OP1}, —C(═O)R^{OP1}, —CO₂R^{OP1}, —C(═O)N(R^{OP2})₂, —C(═NR^{OP2})R^{OP1}, —C(═NR^{OP2})OR^{OP1}, —C(═NR^{OP2}) N(R^{OP2})₂, —S(═O)R^{OP1}, —SO⁺₂R^{OP1}, —Si(R^{OP1})₃, —P(R^{OP3})₂, —P(R^{OP3})⁺₃X⁻, —P(OR^{OP3})₂, —P(OR^{OP3})⁺₃ X⁻, —P(═O)(R^{OP1})₂, —P(═O)(OR^{OP3})₂, and —P(═O)(N(R^{OP2})₂)₂; wherein each X⁻ is a counterion; each R^{OP1} is independently C₁₋₁₀ alkyl, C₁₋₁₀ perhaloalkyl, C₂₋₁₀ alkenyl, C₂₋₁₀ alkynyl, heteroC₁₋₁₀ alkyl, heteroC₂₋₁₀alkenyl, heteroC₂₋₁₀alkynyl, C₃₋₁₀ carbocyclyl, 3-14 membered heterocyclyl, C₆₋₁₄ aryl, or 5-14 membered heteroaryl, or two R^{OP1} groups are joined to form a 3-14 membered heterocyclyl or 5-14 membered heteroaryl ring; each R^{OP2} is hydrogen, OH, OR^{OP1}, —N(R^{OP3})₂, —CN, —C(═O)R^{OP1}, —C(═O)N(R^{OP3})₂, CO₂R^{OP1}, —SO₂R^{OP1}, —C(═NR^{OP3})OR^{OP1}, —C(—NR^{OP3}) N(R^{OP3})₂, —SO₂N(R^{OP3})₂, —SO₂R^{OP3}, —SO₂OR^{OP3}, —SOR^{OP1}, —C(═S) N(R^{OP3})₂, C(═O)SR^{OP3}, —C(═S) SR^{OP3}, —P(═O) (R^{OP1})₂, —P(═O)(OR^{OP3})₂, —P(═O)(N(R^{OP3})₂)₂, C₁₋₁₀ alkyl, C₁₋₁₀ perhaloalkyl, C₂₋₁₀ alkenyl, C₂₋₁₀ alkynyl, heteroC₁₋₁₀alkyl, heteroC₂₋₁₀alkenyl, heteroC₂₋₁₀alkynyl, C₃₋₁₀ carbocyclyl, 3-14 membered heterocyclyl, C₆₋₁₄ aryl, and 5-14 membered heteroaryl, or two R^{OP2} groups are joined to form a 3-14 membered heterocyclyl or 5-14 membered heteroaryl ring; and each R^{OP3} is independently hydrogen, C₁₋₁₀ alkyl, C₁₋₁₀ perhaloalkyl, C₂₋₁₀ alkenyl, C₂₋₁₀ alkynyl, heteroC₁₋₁₀ alkyl, heteroC₂₋₁₀ alkenyl, heteroC₂₋₁₀ alkynyl, C₃₋₁₀ carbocyclyl, 3-14 membered heterocyclyl, C₆₋₁₄ aryl, and 5-14 membered heteroaryl, or two R^{OP3} groups are joined to form a 3-14 membered heterocyclyl or 5-14 membered heteroaryl ring; and wherein each alkyl, alkenyl, alkynyl, carbocyclyl, heterocyclyl, aralkyl, aryl, and heteroaryl of R^{OP1}, R^{OP2} and R^{OP3} can be optionally substituted with 1, 2, 3, 4 or 5 substituents independently selected from OH, CN, SC(O)Ph, oxo (—O), SH, SO₂NH₂, SO₂(C₁-C₄)alkyl, SO₂NH(C₁-C₄)alkyl, halogen, carbonyl, thiol, cyano, NH₂, NH(C₁-C₄)alkyl, N[(C₁-C₄)alkyl]₂, C(O)NH₂, COOH, COOMe, acetyl, (C₁-C₈)alkyl, O(C₁-C₈)alkyl (i.e., C₁-C₈alkoxy), O(C₁-C₅)haloalkyl, (C₂-C₅)alkenyl, (C₂-C₅)alkynyl, haloalkyl, thioalkyl, cyanomethylene, alkylaminyl, aryl, heteroaryl, substituted aryl, NH₂—C(O)-alkylene, NH(Me)-C(O)-alkylene, CH₂—C(O)-alkyl, C(O)-alkyl, alkylcarbonylaminyl, CH₂—[CH(OH)]ₘ—(CH₂)ₚ—OH, CH₂—[CH(OH)]ₘ—(CH₂)ₚ—NH₂ or CH₂-aryl-alkoxy, where “m” and “p” are independently 1, 2, 3, 4, 5 or 6.

[0736] Oxygen protecting groups are well known in the art and include those described in detail in Greene's Protecting Groups in Organic Synthesis, P. G. M. Wuts, 5^{th} Edition, John Wiley & Sons, 2014, incorporated herein by reference.

[0737] Exemplary oxygen protecting groups include, but are not limited to, methyl, t-butyloxycarbonyl (BOC or Boc), methoxylmethyl (MOM), methylthiomethyl (MTM), t-butylthiomethyl, (phenyldimethylsilyl) methoxymethyl (SMOM), benzyloxymethyl (BOM), p-methoxybenzyloxymethyl (PMBM), (4-methoxyphenoxy)methyl (p-AOM), guaiacolmethyl (GUM), t-butoxymethyl, 4-pentenyloxymethyl (POM), siloxymethyl, 2-methoxyethoxymethyl (MEM), 2,2,2-trichloroethoxymethyl, bis(2-chloroethoxy)methyl, 2-(trimethylsilyl) ethoxymethyl (SEMOR), tetrahydropyranyl (THP), 3-bromotetrahydropyranyl, tetrahydrothiopyranyl, 1-methoxycyclohexyl, 4-methoxytetrahydropyranyl (MTHP), 4-methoxytetrahydrothiopyranyl, 4-methoxytetrahydrothiopyranyl S,S-dioxide, 1-[(2-chloro-4-methyl)phenyl]-4-methoxypiperidin-4-yl(CTMP), 1,4-dioxan-2-yl, tetrahydrofuranyl, tetrahydrothiofuranyl, 2,3,3a,4,5,6,7,7a-octahydro-7,8,8-trimethyl-4,7-methanobenzofuran-2-yl, 1-ethoxyethyl, 1-(2-chloroethoxy)ethyl, 1-methyl-1-methoxyethyl, 1-methyl-1-benzyloxyethyl, 1-methyl-1-benzyloxy-2-fluoroethyl, 2,2,2-trichloroethyl, 2-trimethylsilylethyl, 2-(phenylselenyl)ethyl, t-butyl, allyl, p-chlorophenyl, p-methoxyphenyl, 2,4-dinitrophenyl, benzyl (Bn), p-methoxybenzyl, 3,4-dimethoxybenzyl, 0-nitrobenzyl, p-nitrobenzyl, p-halobenzyl, 2,6-dichlorobenzyl, p-cyanobenzyl, p-phenylbenzyl, 2-picolyl, 4-picolyl, 3-methyl-2-picolyl N-oxido, diphenylmethyl, p,p′-dinitrobenzhydryl, 5-dibenzosuberyl, triphenylmethyl, α-naphthyldiphenylmethyl, p-methoxyphenyldiphenylmethyl, di(p-methoxyphenyl)phenylmethyl, tri(p-methoxyphenyl)methyl, 4-(4′-bromophenacyloxyphenyl)diphenylmethyl, 4,4′,4″-tris(4,5-dichlorophthalimidophenyl)methyl, 4,4′,4″-tris(levulinoyloxyphenyl)methyl, 4,4′,4″-tris(benzoyloxyphenyl)methyl, 3-(imidazol-1-yl)bis(4′,4″-dimethoxyphenyl)methyl, 1,1-bis(4-methoxyphenyl)-1′-pyrenylmethyl, 9-anthryl, 9-(9-phenyl)xanthenyl, 9-(9-phenyl-10-oxo)anthryl, 1,3-benzodisulfuran-2-yl, benzisothiazolyl S,S-dioxido, trimethylsilyl (TMS), triethylsilyl (TES), triisopropylsilyl (TIPS), dimethylisopropylsilyl (IPDMS), diethylisopropylsilyl (DEIPS), dimethylthexylsilyl, t-butyldimethylsilyl (TBDMS), t-butyldiphenylsilyl (TBDPS), tribenzylsilyl, tri-p-xylylsilyl, triphenylsilyl,diphenylmethylsilyl (DPMS), t-butylmethoxyphenylsilyl (TBMPS), formate, acetate, chloroacetate, dichloroacetate, trichloroacetate, trifluoroacetate, methoxyacetate, triphenylmethoxyacetate, phenoxyacetate, p-chlorophenoxyacetate, 3-phenylpropionate, 4-oxopentanoate (levulinate), 4,4-(ethylenedithio) pentanoate (levulinoyldithioacetal), adamantoate, crotonate, 4-methoxycrotonate, benzoate, p-phenylbenzoate, 2,4,6-trimethylbenzoate (mesitoate), alkyl methyl carbonate, 9-fluorenylmethyl carbonate (Fmoc), alkyl ethyl carbonate, alkyl 2,2,2-trichloroethyl carbonate (Troc), 2-(trimethylsilyl)ethyl carbonate (TMSEC), 2-(phenylsulfonyl) ethyl carbonate (Psec), 2-(triphenylphosphonio) ethyl carbonate (Peoc), alkyl isobutyl carbonate, alkyl vinyl carbonate alkyl allyl carbonate, alkyl p-nitrophenyl carbonate, alkyl benzyl carbonate, alkyl p-methoxybenzyl carbonate, alkyl 3,4-dimethoxybenzyl carbonate, alkyl o-nitrobenzyl carbonate, alkyl p-nitrobenzyl carbonate, alkyl S-benzyl thiocarbonate, 4-ethoxy-1-napththyl carbonate, methyl dithiocarbonate, 2-iodobenzoate, 4-azidobutyrate, 4-nitro-4-methylpentanoate, o-(dibromomethyl)benzoate, 2-formylbenzenesulfonate, 2-(methylthiomethoxy)ethyl, 4-(methylthiomethoxy) butyrate, 2-(methylthiomethoxymethyl)benzoate, 2,6-dichloro-4-methylphenoxyacetate, 2,6-dichloro-4-(1,1,3,3-tetramethylbutyl) phenoxyacetate, 2,4-bis(1,1-dimethylpropyl) phenoxyacetate, chlorodiphenylacetate, isobutyrate, monosuSP3inoate, (E)-2-methyl-2-butenoate, 0-(methoxyacyl)benzoate, α-naphthoate, nitrate, alkylN,N,N′,N′-tetramethylphosphorodiamidate, alkyl N-phenylcarbamate, borate, dimethylphosphinothioyl, alkyl 2,4-dinitrophenylsulfenate, sulfate, methanesulfonate (mesylate), benzylsulfonate, and tosylate (Ts).

[0738] In some embodiments of any one of the aspects described herein, oxygen protecting group is benzyl, benzoyl, 2,6-dichlorobenzyl, t-butyldimethylsilyl, t-butyldiphenylsilyl, mesylate, tosylate, 4,4′-dimethoxytrityl (DMT), 9-phenylxanthine-9-yl (Pixyl) and 9-(p-methoxyphenyl) xanthine-9-yl (MOX). In certain embodiments, the hydroxyl protecting group is selected from acetyl, benzyl, t-butyldimethylsilyl, t-butyldiphenylsilyl and dimethoxytrityl wherein a more preferred hydroxyl protecting group is 4,4′-dimethoxytrityl.

[0739] The terms “protected hydroxyl” and “protected hydroxyl” as used herein mean a group of the formula —OR^{Pro}, wherein R^{Pro} is an oxygen protecting group as defined herein.

### Nitrogen Protecting Groups

[0740] Some embodiments of the various aspects described herein include a nitrogen protecting group (also referred to as an amino protecting group herein). Nitrogen protecting groups include, but are not limited to, —OH, —OR^{NP1}, —N(R^{NP2})₂, —C(═O)R^{NP1}, —C(═O)N(R^{NP2})₂, —CO₂R^{NP1}, —SO₂R^{NP1}, —C(═NR^{NP2})R^{NP1}, —C(═NR^{NP2})OR^{NP1}, —C(═NR^{NP2}) N(R^{NP2})₂, —SO₂N(R^{NP2})₂, —SO₂R^{NP2}, —SO₂OR^{NP2}, —SOR^{NP1}, —C(═S) N(R^{NP2})₂, —C(═O)SR^{NP2}, —C(═S) SR^{NP2}, C₁₋₁₀ alkyl (e.g., aralkyl, heteroaralkyl), C₂₋₁₀ alkenyl, C₂₋₁₀ alkynyl, C₃₋₁₀ carbocyclyl, 3-14 membered heterocyclyl, C₆₋₁₄ aryl, and 5-14 membered heteroaryl groups, where each R^{NP1} is independently C₁₋₁₀ alkyl, C₁₋₁₀ perhaloalkyl, C₂₋₁₀ alkenyl, C₂₋₁₀ alkynyl, heteroC₁₋₁₀ alkyl, heteroC₂₋₁₀alkenyl, heteroC₂₋₁₀alkynyl, C₃₋₁₀ carbocyclyl, 3-14 membered heterocyclyl, C₆₋₁₄ aryl, or 5-14 membered heteroaryl, or two R^{NP1} groups are joined to form a 3-14 membered heterocyclyl or 5-14 membered heteroaryl ring; and each R^{NP2} is independently hydrogen, C₁₋₁₀ alkyl, C₁₋₁₀ perhaloalkyl, C₂₋₁₀ alkenyl, C₂₋₁₀ alkynyl, heteroC₁₋₁₀ alkyl, heteroC₂₋₁₀ alkenyl, heteroC₂₋₁₀ alkynyl, C₃₋₁₀ carbocyclyl, 3-14 membered heterocyclyl, C₆₋₁₄ aryl, and 5-14 membered heteroaryl, or two R^{SP3} groups are joined to form a 3-14 membered heterocyclyl or 5-14 membered heteroaryl ring, and wherein each alkyl, alkenyl, alkynyl, carbocyclyl, heterocyclyl, aralkyl, aryl, and heteroaryl of R^{NP1} and R^{NP2} can be optionally substituted with 1, 2, 3, 4 or 5 substituents independently selected from OH, CN, SC(O)Ph, oxo (═O), SH, SO₂NH₂, SO₂(C₁-C₄)alkyl, SO₂NH(C₁-C₄)alkyl, halogen, carbonyl, thiol, cyano, NH₂, NH(C₁-C₄)alkyl, N[(C₁-C₄)alkyl]₂, C(O)NH₂, COOH, COOMe, acetyl, (C₁-C₈)alkyl, O(C₁-C₅)alkyl (i.e., C₁-C₈alkoxy), O(C₁-C₈)haloalkyl, (C₂-C₈)alkenyl, (C₂-C₈)alkynyl, haloalkyl, thioalkyl, cyanomethylene, alkylaminyl, aryl, heteroaryl, substituted aryl, NH₂—C(O)-alkylene, NH(Me)-C(O)-alkylene, CH₂C(O)-alkyl, C(O)-alkyl, alkylcarbonylaminyl, CH₂—[CH(OH)]ₘ—(CH₂)ₚ—OH, CH₂—[CH(OH)]ₘ—(CH₂)ₚ—NH₂ or CH₂-aryl-alkoxy, where “m” and “p” are independently 1, 2, 3, 4, 5 or 6.

[0741] Nitrogen protecting groups are well known in the art and include those described in detail in Greene's Protecting Groups in Organic Synthesis, P. G. M. Wuts, 5th Edition, John Wiley & Sons, 2014, incorporated herein by reference.

[0742] Exemplary amide (e.g., —C(═O)R^{NP1}) nitrogen protecting groups include, but are not limited to, formamide, acetamide, chloroacetamide, trichloroacetamide, trifluoroacetamide, N-phenylacetamide, 3-phenylpropanamide, picolinamide, 3-pyridylcarboxamide, benzoylphenylalanyl derivative, benzamide, p-phenylbenzamide, o-nitophenylacetamide, o-nitrophenoxyacetamide, acetoacetamide, (N′-dithiobenzyloxy acylamino) acetamide, 3-(p-hydroxylphenyl) propanamide, 3-(o-nitrophenyl) propanamide, 2-methyl-2-(o-nitrophenoxy) propanamide, 2-methyl-2-(o-phenylazophenoxy) propanamide, 4-chlorobutanamide, 3-methyl-3-nitrobutanamide, 0-nitrocinnamide, N-acetylmethionine derivative, o-nitrobenzamide, and o-(benzoyloxymethyl)benzamide.

[0743] Exemplary carbamate (e.g., —C(═O) OR^{NP1}) nitrogen protecting groups include, but are not limited to, methyl carbamate, ethyl carbamate, 9-fluorenylmethyl carbamate (Fmoc), 9-(2-sulfo) fluorenylmethyl carbamate, 9-(2,7-dibromo) fluoroenylmethyl carbamate, 2,7-di-t-butyl-[9-(10,10-dioxo-10,10,10,10-tetrahydrothioxanthyl)]methyl carbamate (DBD-Tmoc), 4-methoxyphenacyl carbamate (Phenoc), 2,2,2-trichloroethyl carbamate (Troc), 2-trimethylsilylethyl carbamate (Teoc), 2-phenylethyl carbamate (hZ), 1-(1-adamantyl)-1-methylethyl carbamate (Adpoc), 1,1-dimethyl-2-haloethyl carbamate, 1,1-dimethyl-2,2-dibromoethyl carbamate (DB-t-BOC), 1,1-dimethyl-2,2,2-trichloroethyl carbamate (TCBOC), 1-methyl-1-(4-biphenylyl)ethyl carbamate (Bpoc), 1-(3,5-di-t-butylphenyl)-1-methylethyl carbamate (t-Bumeoc), 2-(2′- and 4′-pyridyl)ethyl carbamate (Pyoc), 2-(N,N-dicyclohexylcarboxamido)ethyl carbamate, t-butyl carbamate (BOC or Boc), 1-adamantyl carbamate (Adoc), vinyl carbamate (Voc), allyl carbamate (Alloc), 1-isopropylallyl carbamate (Ipaoc), cinnamyl carbamate (Coc), 4-nitrocinnamyl carbamate (Noc), 8-quinolyl carbamate, N-hydroxylpiperidinyl carbamate, alkyldithio carbamate, benzyl carbamate (Cbz), p-methoxybenzyl carbamate (Moz), p-nitobenzyl carbamate, p-bromobenzyl carbamate, p-chlorobenzyl carbamate, 2,4-dichlorobenzyl carbamate, 4-methylsulfinylbenzyl carbamate (Msz), 9-anthrylmethyl carbamate, diphenylmethyl carbamate, 2-methylthioethyl carbamate, 2-methylsulfonylethyl carbamate, 2-(p-toluenesulfonyl)ethyl carbamate, [2-(1,3-dithianyl)]methyl carbamate (Dmoc), 4-methylthiophenyl carbamate (Mtpc), 2,4-dimethylthiophenyl carbamate (Bmpc), 2-phosphonioethyl carbamate (Peoc), 2-triphenylphosphonioisopropyl carbamate (Ppoc), 1,1-dimethyl-2-cyanoethyl carbamate, m-chloro-p-acyloxybenzyl carbamate, p-(dihydroxylboryl)benzyl carbamate, 5-benzisoxazolylmethyl carbamate, 2-(trifluoromethyl)-6-chromonylmethyl carbamate (Tcroc), m-nitrophenyl carbamate, 3,5-dimethoxybenzyl carbamate, o-nitrobenzyl carbamate, 3,4-dimethoxy-6-nitrobenzyl carbamate, phenyl(o-nitrophenyl)methyl carbamate, t-amyl carbamate, S-benzyl thiocarbamate, p-cyanobenzyl carbamate, cyclobutyl carbamate, cyclohexyl carbamate, cyclopentyl carbamate, cyclopropylmethyl carbamate, p-decyloxybenzyl carbamate, 2,2-dimethoxyacylvinyl carbamate, o-(N,N-dimethylcarboxamido)benzyl carbamate, 1,1-dimethyl-3-(N,N-dimethylcarboxamido) propyl carbamate, 1,1-dimethylpropynyl carbamate, di(2-pyridyl)methyl carbamate, 2-furanylmethyl carbamate, 2-iodoethyl carbamate, isoborynl carbamate, isobutyl carbamate, isonicotinyl carbamate, p-(p′-methoxyphenylazo)benzyl carbamate, 1-methylcyclobutyl carbamate, 1-methylcyclohexyl carbamate, 1-methyl-1-cyclopropylmethyl carbamate, 1-methyl-1-(3,5-dimethoxyphenyl)ethyl carbamate, 1-methyl-1-(p-phenylazophenyl)ethyl carbamate, 1-methyl-1-phenylethyl carbamate, 1-methyl-1-(4-pyridyl)ethyl carbamate, phenyl carbamate, p-(phenylazo)benzyl carbamate, 2,4,6-tri-t-butylphenyl carbamate, 4-(trimethylammonium)benzyl carbamate, and 2,4,6-trimethylbenzyl carbamate.

[0744] Exemplary sulfonamide (e.g., —S(═O)₂R^{NP1}) nitrogen protecting groups include, but are not limited to, such as p-toluenesulfonamide (Ts), benzenesulfonamide, 2,3,6,-trimethyl-4-methoxybenzenesulfonamide (Mtr), 2,4,6-trimethoxybenzenesulfonamide (Mtb), 2,6-dimethyl-4-methoxybenzenesulfonamide (Pme), 2,3,5,6-tetramethyl-4-methoxybenzenesulfonamide (Mte), 4-methoxybenzenesulfonamide (Mbs), 2,4,6-trimethylbenzenesulfonamide (Mts), 2,6-dimethoxy-4-methylbenzenesulfonamide (iMds), 2,2,5,7,8-pentamethylchroman-6-sulfonamide (Pmc), methanesulfonamide (Ms), β-trimethylsilylethanesulfonamide (SES), 9-anthracenesulfonamide, 4-(4′,8′-dimethoxynaphthylmethyl)benzenesulfonamide (DNMBS), benzylsulfonamide, trifluoromethylsulfonamide, and phenacylsulfonamide.

[0745] Additional exemplary nitrogen protecting groups include, but are not limited to, phenothiazinyl-(10)-acyl derivative, N′-p-toluenesulfonylaminoacyl derivative, N′-phenylaminothioacyl derivative, N-benzoylphenylalanyl derivative, N-acetylmethionine derivative, 4,5-diphenyl-3-oxazolin-2-one, N-phthalimide, N-dithiasuNP2inimide (Dts), N-2,3-diphenylmaleimide, N-2,5-dimethylpyrrole, N-1,1,4,4-tetramethyldisilylazacyclopentane adduct (STABASE), 5-substituted 1,3-dimethyl-1,3,5-triazacyclohexan-2-one, 5-substituted 1,3-dibenzyl-1,3,5-triazacyclohexan-2-one, 1-substituted 3,5-dinitro-4-pyridone, N-methylamine, N-allylamine, N-[2-(trimethylsilyl) ethoxy]methylamine (SEM), N-3-acetoxypropylamine, N-(1-isopropyl-4-nitro-2-oxo-3-pyroolin-3-yl)amine, quaternary ammonium salts, N-benzylamine, N-di (4-methoxyphenyl)methylamine, N-5-dibenzosuberylamine, N-triphenylmethylamine (Tr), N-[(4-methoxyphenyl)diphenylmethyl]amine (MMTr), N-9-phenylfluorenylamine (PhF), N-2,7-dichloro-9-fluorenylmethyleneamine, N-ferrocenylmethylamino (Fcm), N-2-picolylamino N′-oxide, N-1,1-dimethylthiomethyleneamine, N-benzylideneamine, N-p-methoxybenzylideneamine, N-diphenylmethyleneamine, N-[(2-pyridyl) mesityl]methyleneamine, N—(N′,N′-dimethylaminomethylene)amine, N,N′-isopropylidenediamine, N-p-nitrobenzylideneamine, N-salicylideneamine, N-5-chlorosalicylideneamine, N-(5-chloro-2-hydroxylphenyl)phenylmethyleneamine, N-cyclohexylideneamine, N-(5,5-dimethyl-3-oxo-1-cyclohexenyl)amine, N-borane and N-diphenylborinic acid derivative, N-[phenyl(pentNP1cylchromium- or tungsten) acyl]amine, N-copper chelate, N-zinc chelate, N-nitroamine, N-nitrosoamine, amine N-oxide, diphenylphosphinamide (Dpp), dimethylthiophosphinamide (Mpt), diphenylthiophosphinamide (Ppt), dialkyl phosphoramidates, dibenzyl phosphoramidate, diphenyl phosphoramidate, benzenesulfenamide, 0-nitrobenzenesulfenamide (Nps), 2,4-dinitrobenzenesulfenamide, pentachlorobenzenesulfenamide, 2-nitro-4-methoxybenzenesulfenamide, triphenylmethylsulfenamide, and 3-nitropyridinesulfenamide (Npys).

### Sulfur Protecting Groups

[0746] Some embodiments of the various aspects described herein include sulfur protecting group (also referred to as a thiol protecting group herein). Sulfur protecting groups include, but are not limited to, —R^{SP1}, —N(R^{SP2})₂, —C(═O)SR^{SP1}, —C(═O)R^{SP1}, —CO₂R^{SP1}, C(═O)N(R^{SP2})₂, —C(═NR^{SP2})R^{SP1}, —C(═NR^{SP2})OR^{SP1}, —C(═NR^{SP2}) N(R^{SP2})₂, —S(═O)R^{SP1}, —SO₂R^{SP1}, —Si(R^{SP1})₃, —P(R^{SP3})₂, —P(R^{SP3})⁺₃ X⁻, —P(OR^{SP3})₂, —P(OR^{SP3})⁺₃ X⁻, —P(═O)(R^{SP1})₂, —P(═O)(OR^{SP3})₂, and —P(═O)(N(R^{SP2})₂)₂, wherein

[0747] X⁻ is a counterion; each R^{SP1} is independently C₁₋₁₀ alkyl, C₁₋₁₀ perhaloalkyl, C₂₋₁₀ alkenyl, C₂₋₁₀ alkynyl, heteroC₁₋₁₀ alkyl, heteroC₂₋₁₀alkenyl, heteroC₂₋₁₀alkynyl, C₃₋₁₀ carbocyclyl, 3-14 membered heterocyclyl, C₆₋₁₄ aryl, or 5-14 membered heteroaryl, or two R^{SP1} groups are joined to form a 3-14 membered heterocyclyl or 5-14 membered heteroaryl ring; each R^{SP2} is hydrogen, —OH, OR^{SP1}, —N(R^{SP3})₂, CN, —C(═O)R^{SP1}, C(═O)N(R^{SP3})₂, —CO₂R^{SP1} SO₂R^{SP1}, —C(═NR^{SP3})OR^{SP1}, —C(═NR^{SP3}) N(R^{SP3})₂, —SO₂N(R^{SP3})₂, —SO₂R^{SP3}, —SO₂OR^{SP3}, —SOR^{SP1}, —C(═S) N(R^{SP3})₂, —C(═O)SR^{SP3}, —C(═S) SR^{SP3}, —P(═O) (R^{SP1})₂, —P(═O)(OR^{SP3})₂, —P(═O)(N(R^{SP3})₂)₂, C₁₋₁₀ alkyl, C₁₋₁₀ perhaloalkyl, C₂₋₁₀ alkenyl, C₂₋₁₀ alkynyl, heteroC₁₋₁₀alkyl, heteroC₂₋₁₀alkenyl, heteroC₂₋₁₀alkynyl, C₃₋₁₀ carbocyclyl, 3-14 membered heterocyclyl, C₆₋₁₄ aryl, and 5-14 membered heteroaryl, or two R^{SP2} groups are joined to form a 3-14 membered heterocyclyl or 5-14 membered heteroaryl ring; and each R^{SP3} is independently hydrogen, C₁₋₁₀ alkyl, C₁₋₁₀ perhaloalkyl, C₂₋₁₀ alkenyl, C₂₋₁₀ alkynyl, heteroC₁₋₁₀ alkyl, heteroC₂₋₁₀ alkenyl, heteroC₂₋₁₀ alkynyl, C₃₋₁₀ carbocyclyl, 3-14 membered heterocyclyl, C₆₋₁₄ aryl, and 5-14 membered heteroaryl, or two R^{SP3} groups are joined to form a 3-14 membered heterocyclyl or 5-14 membered heteroaryl ring; and wherein each alkyl, alkenyl, alkynyl, carbocyclyl, heterocyclyl, aralkyl, aryl, and heteroaryl of R^{SP1}, R^{SP2} and R^{SP3} can be optionally substituted with 1, 2, 3, 4 or 5 substituents independently selected from OH, CN, SC(O)Ph, oxo (═O), SH, SO₂NH₂, SO₂(C₁-C₄)alkyl, SO₂NH(C₁-C₄)alkyl, halogen, carbonyl, thiol, cyano, NH₂, NH(C₁-C₄)alkyl, N[(C₁-C₄)alkyl]₂, C(O)NH₂, COOH, COOMe, acetyl, (C₁-C₈)alkyl, O(C₁-C₈)alkyl (i.e., C₁-C₈alkoxy), O(C₁-C₈)haloalkyl, (C₂-C₈)alkenyl, (C₂-C₈)alkynyl, haloalkyl, thioalkyl, cyanomethylene, alkylaminyl, aryl, heteroaryl, substituted aryl, NH₂—C(O)-alkylene, NH(Me)-C(O)-alkylene, CH₂C(O)— alkyl, C(O)-alkyl, alkylcarbonylaminyl, CH₂—[CH(OH)]ₘ—(CH₂)ₚ—OH, CH₂—[CH(OH)]ₘ—(CH₂)ₚ—NH₂ or CH₂-aryl-alkoxy, where “m” and “p” are independently 1, 2, 3, 4, 5 or 6.

[0748] Sulfur protecting groups are well known in the art and include those described in detail in Greene's Protecting Groups in Organic Synthesis, P. G. M. Wuts, 5th Edition, John Wiley & Sons, 2014, incorporated herein by reference.

[0749] Exemplary embodiments of the various aspects described herein can be illustrated by the following numbered embodiments:

[0750] Embodiment 1: A double-stranded RNA (dsRNA) comprising an antisense strand and a sense strand complementary to the antisense strand, wherein the antisense strand comprises at its 3′-end a first ligand, wherein the antisense strand comprises at least one nuclease resistant modification at its 3′-end and at least one nuclease resistant modification at its 5′-end, and wherein the dsRNA has a double-stranded region of at least about 15 base-pairs.

[0751] Embodiment 2: The dsRNA of Embodiment 1, wherein the sense strand comprises at least one nuclease resistant modification at its 5′-end.

[0752] Embodiment 3: The dsRNA of Embodiment 1 or 2, wherein the sense strand comprises at least one nuclease resistant modification at its 3′-end and at least one nuclease resistant modification at its 5′-end.

[0753] Embodiment 4: The dsRNA of any one of the preceding Embodiments, wherein the at least one nuclease resistant modification is a modified internucleoside linkage, a modified sugar moiety or a modified nucleobase.

[0754] Embodiment 5: The dsRNA of any one of the preceding Embodiments, wherein the at least one nuclease resistant modification is a phosphorothioate internucleoside linkage, a phosphorodithioate internucleoside linkage, a 2′-5′-linked nucleotide, or a L-nucleotide.

[0755] Embodiment 6: The dsRNA of any one of the preceding Embodiments, wherein the dsRNA comprises at least 4 phosphorothioate internucleoside linkages, e.g., at least 6 phosphorothioate internucleoside linkages, at least 8 phosphorothioate internucleoside linkages or at least 10 phosphorothioate internucleoside linkages.

[0756] Embodiment 7: The dsRNA of any one of the preceding claims, wherein the antisense strand comprises at least two, e.g., three, four, five, six or more phosphorothioate internucleoside linkages.

[0757] Embodiment 8: The dsRNA of any one of the preceding Embodiments, wherein the antisense strand comprises a phosphorothioate internucleoside linkage between positions 1 and 2, counting from the 3′-end of the strand, and a phosphorothioate internucleoside linkage between positions 1 and 2, counting from the 5′-end of the strand.

[0758] Embodiment 9: The dsRNA of any one of the preceding Embodiments, wherein the antisense strand comprises a phosphorothioate internucleoside linkage between positions 1 and 2, and between positions 2 and 3, counting from the 3′-end of the strand, and a phosphorothioate internucleoside linkage between positions 1 and 2, counting from the 5′-end of the strand.

[0759] Embodiment 10: The dsRNA of any one of the preceding Embodiments, wherein the antisense strand comprises a phosphorothioate internucleoside linkage between positions 1 and 2, and between positions 2 and 3, counting from the 3′-end of the strand, and a phosphorothioate internucleoside linkage between positions 1 and 2, and between positions 2 and 3, counting from the 5′-end of the strand.

[0760] Embodiment 11: The dsRNA of any one of the preceding Embodiments, wherein the antisense strand comprises a phosphorothioate internucleoside linkage between positions 1 and 2, between positions 2 and 3, and between positions 3 and 4, counting from the 3′-end of the strand, and a phosphorothioate internucleoside linkage between positions 1 and 2, counting from the 5′-end of the strand.

[0761] Embodiment 12: The dsRNA of any one of the preceding Embodiments, wherein the antisense strand comprises a phosphorothioate internucleoside linkage between positions 1 and 2, counting from the 3′-end of the strand, and a phosphorothioate internucleoside linkage between positions 1 and 2, and between positions 2 and 3, counting from the 5′-end of the strand.

[0762] Embodiment 13: The dsRNA of any one of the preceding Embodiments, wherein the antisense strand comprises a phosphorothioate internucleoside linkage between positions 1 and 2, counting from the 3′-end of the strand, and a phosphorothioate internucleoside linkage between positions 1 and 2, between positions 2 and 3, and between positions 3 and 4, counting from the 5′-end of the strand.

[0763] Embodiment 14: The dsRNA of any one of the preceding Embodiments, wherein the sense strand comprises at least one, e.g., two, three, four or more phosphorothioate internucleoside linkages.

[0764] Embodiment 15: The dsRNA of any one of the preceding Embodiments, wherein the sense strand comprises a phosphorothioate internucleoside linkage between positions 1 and 2, counting from 5′-end of the strand.

[0765] Embodiment 16: The dsRNA of any one of the preceding Embodiments, wherein the sense strand comprises a phosphorothioate internucleoside linkage between positions 1 and 2, counting from 5′-end of the strand, and between positions 1 and 2, counting from 3′-end of the strand.

[0766] Embodiment 17: The dsRNA any one of the preceding Embodiments, wherein the sense strand comprises a phosphorothioate internucleoside linkage between positions 1 and 2, and between positions 2 and 3, counting from 5′-end of the strand.

[0767] Embodiment 18: The dsRNA any one of the preceding Embodiments, wherein the sense strand comprises a phosphorothioate internucleoside linkage between positions 1 and 2, and between positions 2 and 3, counting from 5′-end of the strand, and between positions 1 and 2, and between positions 2 and 3, counting from 3′-end of the strand.

[0768] Embodiment 19: The dsRNA of any one of the preceding Embodiments, wherein the ligand is linked to 3′-hydroxyl of the nucleotide at position 1, counting from 3′-end, of antisense strand.

[0769] Embodiment 20: The dsRNA of any one of the preceding Embodiments, wherein the first ligand is linked to the 3′-end of the antisense strand via a linker.

[0770] Embodiment 21: The dsRNA of Embodiment 20, wherein the linker is a hydrophobic linker.

[0771] Embodiment 22: The dsRNA of Embodiment 20 or 21, where the linker is linked to the 3′-end of the antisense strand via a phosphodiester or phosphorothioate internucleoside linkage.

[0772] Embodiment 23: The dsRNA of any one of Embodiments 20-22, wherein the linker is from about 5 Angstroms to about 250 Angstroms in length, e.g., from about 10 Angstroms to about 200 Angstroms, from about 15 Angstroms to about 150 Angstroms, from about 20 Angstroms to about 100 Angstroms, from about 25 Angstroms to about 75 Angstroms, from about 5 Angstroms to about 50 Angstroms, from about 10 Angstroms to about 40 Angstroms or from about 20 Angstroms to about 30 Angstroms in length.

[0773] Embodiment 24: The dsRNA of any one of Embodiments 20-23, wherein the linker has a chain length of at least 6 atoms (e.g., 6, 7, 8, 9, 10, 11, 12, 13, 14, 15, 16, 17, 18, 19, 20, 21, 22, 23, 24, 25, 26, 27, 28, 29 or 30 atoms).

[0774] Embodiment 25: The dsRNA of any one of Embodiments 20-24, wherein the linker comprises a hydrophobic carrier connected to a carrier.

[0775] Embodiment 26: The dsRNA of Embodiment 25, wherein the carrier comprises a hydrogen-bonding acceptor (e.g., a tertiary amide or tertiary amine).

[0776] Embodiment 27: The dsRNA of Embodiment 26, wherein the carrier comprises a pyrrolidine ring.

[0777] Embodiment 28: The dsRNA of any one of the preceding Embodiments, wherein the antisense strand is at least about 17, e.g., about 18, about 19, about 20, about 21, about 22, about 23, about 24, about 25, about 26, about 27, about 28, about 29, about 30 or more (e.g., about 17-42), nucleotides in length.

[0778] Embodiment 29: The dsRNA of any one of the preceding Embodiments, wherein the antisense strand is about 19, about 20, about 21, about 22, about 23, about 24, about 25 or about 26 nucleotides in length.

[0779] Embodiment 30: The dsRNA of any one of the preceding Embodiments, wherein the antisense strand is about 22, about 23 or about 25 nucleotides in length.

[0780] Embodiment 31: The dsRNA of any one of the preceding Embodiments, wherein the sense strand is at least about 15, about 16, e.g., about 17, about 18, about 19, about 20, about 21, about 22, about 23, about 24, about 25, about 26, or more (e.g., about 15-40), nucleotides in length.

[0781] Embodiment 32: The dsRNA of any one of the preceding Embodiments, wherein the sense strand is about 19, about 20, about 21, about 22, about 23, about 24 or about 25 nucleotides in length.

[0782] Embodiment 33: The dsRNA of any one of the preceding Embodiments, wherein the sense strand is about 21 nucleotides in length.

[0783] Embodiment 34: The dsRNA of any one of the preceding Embodiments, wherein:
[0784] (a) the sense strand is 15 nucleotides in length and the antisense strand is 18, 19, 20, 21, or 22 (e.g., 20) nucleotides in length;
[0785] (b) the sense strand is 19 nucleotides in length and the antisense strand is 19, 20, or 21 nucleotides in length;
[0786] (c) the sense strand is 20 nucleotides in length and the antisense strand is 20, 21, or 22 nucleotides in length;
[0787] (d) the sense strand is 21 nucleotides in length and the antisense strand is 21, 22, or 23 nucleotides in length; or
[0788] (e) the sense strand is 20-24 (e.g., 22) nucleotides in length and the antisense strand is 34-38 (e.g. 36) nucleotides in length.

[0789] Embodiment 35: The dsRNA of any one of the preceding Embodiments, wherein the dsRNA has a double-stranded region of at least about 15, e.g., about 16, about 17, about 18, about 19, about 20, about 21, about 22, about 23, about 24, about 25 or more base-pairs.

[0790] Embodiment 36: The dsRNA of any one of the preceding Embodiments, wherein the dsRNA has a double-stranded region of about 21 base-pairs.

[0791] Embodiment 37: The dsRNA of any one of the preceding Embodiments, wherein the sense strand is about 21 nucleotides in length and the antisense strand is about 21, about 22, about 23, about 24 or about 25 nucleotides in length, and wherein the dsRNA comprises a double-stranded region of at least 18, e.g., 19, 20 or 21 base-pairs.

[0792] Embodiment 38: The dsRNA of any one of the preceding Embodiments, wherein the dsRNA comprises at least one single-stranded overhang comprising 1-5 nucleotides (e.g., 1 or 2 nucleotides).

[0793] Embodiment 39: The dsRNA of any one of the preceding Embodiments, wherein the antisense strand comprises a single-stranded overhang at its 3′-end.

[0794] Embodiment 40: The dsRNA of any one of the preceding Embodiments, wherein the dsRNA comprises at least one blunt-end.

[0795] Embodiment 41: The dsRNA of any one of the preceding Embodiments, wherein the antisense strand comprises a blunt end at its 5′-end.

[0796] Embodiment 42: The dsRNA of any one of the preceding Embodiments, wherein the antisense strand comprises a single-stranded overhang at its 3′-end and a blunt end at its 5′-end.

[0797] Embodiment 43: The dsRNA of any one of Embodiments 38-42, wherein the antisense strand comprises at least one nuclease resistant modification in the single-stranded overhang.

[0798] Embodiment 44: The dsRNA of any one of Embodiments 38-43, wherein the antisense strand comprises at least one phosphorothioate internucleoside linkage in the single-stranded overhang.

[0799] Embodiment 45: The dsRNA of any one of the preceding Embodiments, wherein the first ligand is selected from the group consisting of peptides, centyrins, antibodies (e.g., antiCD-4 antibodies and antiCD-117 antibodies), antibody fragments, T-cell targeting ligands, B-cell targeting ligands, cancer cell targeting ligands (e.g., DUPA, folate, and RGD), spleen targeting functionalities, lung targeting functionalities, bone marrow targeting functionalities, phage display peptides, cell permeation peptides (CPPs), integrin ligands, multianionic ligands, multicationic ligands, monovalent and multivalent carbohydrates (e.g., GalNAc, mannose, mannose-6 phosphate, fucose, mucose, and mucose), kidney targeting ligands, BBB penetration ligands, lipids, and amino acids (e.g., L-amino acids, D-amino acids, and β-amino acids).

[0800] Embodiment 46: The dsRNA of any one of the preceding Embodiments, wherein the first ligand is a targeting ligand, a pharmacokinetics modulator (PK modulator) or an endosomolytic ligand.

[0801] Embodiment 47: The dsRNA of any one of the preceding Embodiments wherein the first ligand is a targeting ligand.

[0802] Embodiment 48: The dsRNA of any one of the preceding Embodiments, wherein the ligand comprises GalNAc.

[0803] Embodiment 49: The dsRNA of any one of the preceding Embodiments, wherein the ligand is

[chemical structure]

[chemical structure]

[chemical structure]

[chemical structure]

[chemical structure]

[0804] Embodiment 50: The daRNA of any one of the preceding Embodiments, wherein the daRNA comprises a second ligand.

[0805] Embodiment 51: The deRNA of Embodiment 50, wherein the second ligand is linked to the sense strand.

[0806] Embodiment 52: The deRNA of Embodiment 50 or 51, wherein the second ligand is linked to 3′-end of the sense strand.

[0807] Embodiment 53: The dsRNA of Embodiment 50 or 51, wherein the second ligand is linked to 5′-end of the sense strand.

[0808] Embodiment 54: The dsRNA of any one of Embodiments 50-53, wherein the second ligand is selected from the group consisting of peptides, centyrins, antibodies (e.g., antiCD-4 antibodies and antiCD-117 antibodies), antibody fragments, T-cell targeting ligands, B-cell targeting ligands, cancer cell targeting ligands (e.g., DUPA, folate, and RGD), spleen targeting functionalities, lung targeting functionalities, bone marrow targeting functionalities, phage display peptides, cell permeation peptides (CPPs), integrin ligands, multianionic ligands, multicationic ligands, monovalent and multivalent carbohydrates (e.g., GalNAc, mannose, mannose-6 phosphate, mucose, and mlucose), kidney targeting ligands, BBB penetration ligands, lipids, and amino acids (e.g., L-amino acids, D-amino acids, and β-amino acids).

[0809] Embodiment 55: The dsRNA of any one of Embodiments 50-54, wherein the second ligand is a PK modulator, a targeting ligand or an endosomolytic ligand.

[0810] Embodiment 56: The dsRNA of any one of Embodiments 50-55, wherein the second ligand is a PK modulator.

[0811] Embodiment 57: The dsRNA of any one of Embodiments 50-56, wherein the second ligand binds a serum protein, e.g., serum albumin.

[0812] Embodiment 58: The dsRNA of any one of Embodiments 50-57, wherein the second ligand comprises iodipamide, azapropazone, indomethacin, tiblone (TIB), 3-carboxy-4-methyl-5-propyl-2-furanpropanoic acid (CMPF), DIS, oxyphenbutazone, phenylbutazone, warfarin, indoxyl sulfate, diflunisal, halothane, ibuprofen, diazepam, propofol, or any combination thereof.

[0813] Embodiment 59: The dsRNA of any one of Embodiments 50-58, wherein the second ligand comprises ibuprofen.

[0814] Embodiment 60: The dsRNA of any one of Embodiments 50-59, wherein the first and second ligands are different.

[0815] Embodiment 61: The dsRNA of any one of Embodiments 50-60, wherein the first ligand is a targeting ligand and the second ligand is a PK modulator.

[0816] Embodiment 62: The dsRNA of any one of Embodiments 50-61, wherein the first ligand comprises GalNac and the second ligand comprises ibuprofen.

[0817] Embodiment 63: The dsRNA of any one of the preceding Embodiments, wherein the dsRNA comprises at least one, e.g., 2, 3, 4, 5, 6, 7, 8, 9, 10 or more 2′-fluoro nucleotide.

[0818] Embodiment 64: The dsRNA of any one of the preceding Embodiments, wherein the antisense strand comprises at least one, e.g., 2, 3, 4, 5 or more 2′-fluoro nucleotides.

[0819] Embodiment 65: The dsRNA of any one of the preceding Embodiments, wherein the antisense strand comprises a 2′-fluoro nucleotide at positions 2, 14 and 16, counting from the 5′-end of the antisense strand.

[0820] Embodiment 66: The dsRNA of any one of the preceding Embodiments, wherein the antisense strand comprises a 2′-fluoro nucleotide at positions 2, 6, 14 and 16, counting from the 5′-end of the antisense strand.

[0821] Embodiment 67: The dsRNA of any one of the preceding Embodiments, wherein the antisense strand comprises a 2′-fluoro nucleotide at positions 2, 6, 9, 14 and 16, counting from the 5′-end of the antisense strand.

[0822] Embodiment 68: The dsRNA of any one of the preceding Embodiments, wherein the antisense strand comprises a 2′-fluoro nucleotide at positions 2, 6, 8, 9, 14 and 16, counting from the 5′-end of the antisense strand.

[0823] Embodiment 69: The dsRNA of any one of the preceding Embodiments, wherein the antisense strand comprises at least one, e.g., 2, 3, 4, 5 or more 2′-fluoro nucleotides.

[0824] Embodiment 70: The dsRNA of any one of the preceding Embodiments, wherein the sense strand comprises a 2′-fluoro nucleotide at positions 7, 9 and 11, counting from the 5′-end of the sense strand or at positions 11, 13 and 15, counting from the 3′-end of the sense strand.

[0825] Embodiment 71: The dsRNA of any one of the preceding Embodiments, wherein the sense strand comprises a 2′-fluoro nucleotide at positions 7, 9, 10 and 11, counting from the 5′-end of the sense strand or at positions 11, 12, 13 and 15, counting from the 3′-end of the sense strand.

[0826] Embodiment 72: The dsRNA of any one of the preceding Embodiments, wherein the sense strand comprises a 2′-fluoro nucleotide at positions 9, 10, and 11, counting from the 5′-end of the sense strand or at positions 11, 12, and 13 counting from the 3′-end of the sense strand. Embodiment 73: The dsRNA of any one of the preceding Embodiments, the antisense strand comprises at least one, e.g., 2, 3, 4, 5, 6, 7 or more DNA nucleotides.

[0827] Embodiment 74: The dsRNA of any one of the preceding Embodiments, wherein the antisense strand comprises a DNA nucleotide at positions 2, 5, 7, and 12, counting from the 5′-end of the antisense strand.

[0828] Embodiment 75: The dsRNA of any one of the preceding Embodiments, wherein the antisense strand comprises a DNA nucleotide at positions 2, 5, 7, 12, and 14 counting from the 5′-end of the antisense strand.

[0829] Embodiment 76: The dsRNA of any one of the preceding Embodiments, wherein the antisense strand comprises a DNA nucleotide at positions 2, 5, 7, 12, 14 and 16 counting from the 5′-end of the antisense strand.

[0830] Embodiment 77: The dsRNA of any one of the preceding Embodiments, wherein the antisense strand comprises a DNA nucleotide at positions 2, 5, 7, and 12 counting from the 5′-end of the antisense strand; and a 2′-fluoro nucleotide at position 14 of the antisense strand.

[0831] Embodiment 78: The dsRNA of any one of the preceding Embodiments, wherein the dsRNA comprises at least one, e.g., 2, 3, 4, 5, 6, 7, 8, 9, 10 or more 2′-OMe nucleotides.

[0832] Embodiment 79: The dsRNA of any one of the preceding Embodiments, wherein the antisense strand comprises at least one 2′-OMe nucleotide.

[0833] Embodiment 80: The dsRNA of any one of the preceding Embodiments, wherein all remaining nucleotides in the antisense strand are 2′-OMe nucleotides.

[0834] Embodiment 81: The dsRNA of any one of the preceding Embodiments, wherein the sense strand comprises at least one 2′-OMe nucleotide.

[0835] Embodiment 82: The dsRNA of anyone of the preceding Embodiments, wherein all remaining nucleotides in the sense strand are 2′-OMe nucleotides.

[0836] Embodiment 83: The dsRNA of any one of the preceding Embodiments, wherein the antisense strand comprises a phosphate group or a phosphate analog or derivative thereof at its 5′-end.

[0837] Embodiment 84: The dsRNA of any one of the preceding Embodiments, wherein the antisense strand comprises a vinylphosphonate (e.g., E-vinylphosphonate) group at its 5′-end.

[0838] Embodiment 85: The dsRNA of any one of the preceding Embodiments, wherein the dsRNA comprises at least one, e.g., 2, 3, 4, 5, 6, 7, 8, 9, 10 or more locked nucleic acid (LNA) or bridged nucleic acid (BNA) nucleotides.

[0839] Embodiment 86: The dsRNA of any one of the preceding Embodiments, wherein the antisense strand comprises at least one, e.g., 2, 3, 4, 5 or more LNA or BNA nucleotides.

[0840] Embodiment 87: The dsRNA of any one of the preceding Embodiments, wherein the sense strand comprises at least one, e.g., 2, 3, 4, 5 or more LNA or BNA nucleotides.

[0841] Embodiment 88: The dsRNA of any one of the preceding Embodiments, wherein the dsRNA comprises at least one, e.g., 2, 3, 4, 5, 6, 7, 8, 9, 10 or more cyclohexene nucleic acid (CeNA) nucleotides.

[0842] Embodiment 89: The dsRNA of any one of the preceding Embodiments, wherein the antisense strand comprises at least one, e.g., 2, 3, 4, 5 or more CeNA nucleotides.

[0843] Embodiment 90: The dsRNA of any one of the preceding Embodiments, wherein the sense strand comprises at least one, e.g., 2, 3, 4, 5 or more CeNA nucleotides.

[0844] Embodiment 91: The dsRNA of any one of the preceding Embodiments, wherein the dsRNA comprises at least one, e.g., 2, 3, 4, 5, 6, 7, 8, 9, 10 or more thermally stabilizing modifications.

[0845] Embodiment 92: The dsRNA of any one of the preceding Embodiments, wherein the antisense strand comprises at least one, e.g., 2, 3, 4, 5 or more thermally stabilizing modifications.

[0846] Embodiment 93: The dsRNA of any one of the preceding Embodiments, wherein the sense strand comprises at least one, e.g., 2, 3, 4, 5 or more thermally stabilizing modifications.

[0847] Embodiment 94: The dsRNA of any one of the preceding Embodiments, wherein the dsRNA comprises at least one, e.g., 2, 3, 4, 5, 6, 7, 8, 9, 10 or more abasic nucleotides.

[0848] Embodiment 95: The dsRNA of any one of the preceding Embodiments, wherein the antisense strand comprises at least one, e.g., 2, 3, 4, 5 or more abasic nucleotides.

[0849] Embodiment 96: The dsRNA of any one of the preceding Embodiments, wherein the sense strand comprises at least one, e.g., 2, 3, 4, 5 or more abasic nucleotides.

[0850] Embodiment 97: The dsRNA of any one of the preceding Embodiments, wherein the dsRNA comprises at least one, e.g., 2, 3, 4, 5, 6, 7, 8, 9, 10 or more 2′-deoxy nucleotides.

[0851] Embodiment 98: The dsRNA of any one of the preceding Embodiments, wherein the antisense strand comprises at least one, e.g., 2, 3, 4, 5 or more 2′-deoxy nucleotides.

[0852] Embodiment 99: The dsRNA of any one of the preceding Embodiments, wherein the sense strand comprises at least one, e.g., 2, 3, 4, 5 or more 2′-deoxy nucleotides.

[0853] Embodiment 100: The dsRNA of any one of the preceding Embodiments, wherein the dsRNA comprises at least one, e.g., 2, 3, 4, 5, 6, 7, 8, 9, 10 or more acyclic (e.g., unlocked nucleic acid (UNA) or glycol nucleic acid (GNA)) nucleotides.

[0854] Embodiment 101: The dsRNA of any one of the preceding Embodiments, wherein the antisense strand comprises at least one, e.g., 2, 3, 4, 5 or more acyclic (e.g., unlocked nucleic acid (UNA) or glycol nucleic acid (GNA)) nucleotides.

[0855] Embodiment 102: The dsRNA of any one of the preceding Embodiments, wherein the sense strand comprises at least one, e.g., 2, 3, 4, 5 or more acyclic (e.g., unlocked nucleic acid (UNA) or glycol nucleic acid (GNA)) nucleotides.

[0856] Embodiment 103: The dsRNA of any one of the preceding Embodiments, wherein the dsRNA comprises at least one thermally destabilizing modification.

[0857] Embodiment 104: The dsRNA of any one of the preceding Embodiments, wherein the antisense strand comprises at least one thermally destabilizing modification.

[0858] Embodiment 105: The dsRNA of any one of the preceding Embodiments, wherein the antisense strand comprises at least one thermally destabilizing modification in the seed region (i.e., positions 2-9 from the 5′-end) of the antisense strand.

[0859] Embodiment 106: The dsRNA of any one of the preceding Embodiments, wherein the antisense strand comprises a thermally destabilizing modification at least at one of positions 6, 7 or 8, counting from the 5′-end of the strand.

[0860] Embodiment 107: The dsRNA of any one of the preceding Embodiments, wherein the antisense strand comprises a thermally destabilizing modification at position 7, counting from the 5′-end of the strand.

[0861] Embodiment 108: The dsRNA of any one of Embodiments 103-107, wherein the thermally destabilizing modification is an abasic nucleotide, 2′-deoxy nucleotides, acyclic nucleotide (e.g., unlocked nucleic acid (UNA), glycol nucleic acid (GNA) or(S)-glycol nucleic acid (S-GNA)), a 2′-5′ linked nucleotide (3′-RNA), threose nucleotide (TNA), 2′ gem Me/F nucleotide, or mismatch with an opposing nucleotide in the other strand.

[0862] Embodiment 109: The dsRNA of any one of the preceding Embodiments, wherein the first ligand is GalNAc and the second ligand is a mannose receptor targeting ligand (e.g., multivalent mannose).

[0863] Embodiment 110: The dsRNA of any one of the preceding Embodiments, wherein the first ligand is GalNAc and the second ligand is a folic acid ligand.

[0864] Embodiment 111: A compound of Formula (I):

[chemical structure]

[0865] wherein:
[0866] B an optionally modified nucleobase;
[0867] X^{S} is O, CH₂, S, or NH;
[0868] R² is hydroxyl, protected hydroxyl, halogen, optionally substituted C₁₋₃₀ alkoxy (e.g., methoxy, 2-methoxyethoxy), alkoxyalkyl (e.g., 2-methoxyethyl), hydrogen, optionally substituted C₁₋₃₀ alkyl, optionally substituted C₂₋₃₀alkenyl, optionally substituted C₂₋₃₀alkynyl, alkoxyalkylamine, alkoxyoxycarboxylate, amino, alkylamino, dialkylamino, 5-8 membered heterocyclyl, —O—C₄₋₃₀alkyl-ON(CH₂R⁸) (CH₂R⁹), —O—C₄₋₃₀alkyl-ON(CH₂R⁸)(CH₂R⁹), phosphate group, reactive phosphorous group, a ligand, or a linker covalently bonded to one or more ligands;
[0869] R³ is a reactive phosphorous group, hydroxyl, protected hydroxyl, halogen, optionally substituted C₂₋₃₀alkynyl, optionally substituted C₁₋₃₀ alkoxy (e.g., methoxy, 2-methoxyethoxy), alkoxyalkyl (e.g., 2-methoxyethyl), hydrogen, optionally substituted C₁₋₃₀ alkyl, optionally substituted C₂₋₃₀alkenyl, alkoxyalkylamine, alkoxyoxycarboxylate, amino, alkylamino, dialkylamino, 5-8 membered heterocyclyl, —O—C₄₋₃₀alkyl-ON(CH₂R⁸)(CH₂R⁹), —O—C₄₋₃₀alkyl-ON(CH₂R⁸)(CH₂R⁹), phosphate group, a ligand, or a linker covalently bonded to one or more ligands;
[0870] R⁴ is hydrogen, optionally substituted C₁₋₆alkyl, optionally substituted C₂₋₆alkenyl, optionally substituted C₂₋₆alkynyl, or optionally substituted C₁₋₆alkoxy;
[0871] or R⁴ and R² taken together are 4′-C(R¹⁰R¹¹)ᵥ—Y-2′ or 4′-Y—C(R¹⁰R¹¹)ᵥ-2′;
[0872] Y is —O—, —CH₂—, —CH(Me)-, —C(CH₃)₂—, —S—, —N(R¹²)—, —C(O)—, —C(S)—, —S(O)—, —S(O)₂—, —OC(O)—, —C(O)O—, —N(R¹²)C(O)—, or —C(O)N(R¹²)—;
[0873] R¹⁰ and R¹¹ independently are H, optionally substituted C₁-C₆alkyl, optionally substituted C₂-C₆alkenyl or optionally substituted C₂-C₆alkynyl;
[0874] R¹² is hydrogen, optionally substituted C₁₋₃₀alkyl, optionally substituted C₁-C₃₀alkoxy, C₁₋₄haloalkyl, optionally substituted C₂₋₄alkenyl, optionally substituted C₂₋₄alkynyl, optionally substituted C₁₋₃₀alkyl-CO₂H, or a nitrogen-protecting group;
[0875] v is 1, 2 or 3; and
[0876] R⁵ is -L¹-R^{H}, —O—N(R¹³)R¹⁴;
[0877] L¹ is a bond, -L³-, C₁₋₃₀alkylene, C₂₋₃₀alkenylene, C₂₋₃₀alkynylene, *-L³-C₁₋₃₀alkylene *-L³-C₂₋₃₀alkenylene, or *-L³-C₂₋₃₀alkynylene;
[0878] L³ is —O—, —N(R^{L3})—, —S—, —C(O)—, —S(O)—, —S(O)₂—, —P(X^{L3})(Y^{L3}R^{L3B})—;
[0879] where R^{L3} is hydrogen, optionally substituted C₁₋₃₀alkyl, optionally substituted C₁-C₃₀alkoxy, C₁₋₄haloalkyl, optionally substituted C₂₋₄alkenyl, optionally substituted C₂₋₄alkynyl, optionally substituted C₁₋₃₀alkyl-CO₂H, or a nitrogen-protecting group;
[0880] X^{L2} is O or S;
[0881] Y^{L3} is O, S, NH, or a bond; and
[0882] R^{L3B} is H or optionally substituted alkyl; and
[0883] * is bond to R^{H};
[0884] and
[0885] R^{H} is 4-8 membered heterocyclyl comprising 1, 2 or 3 heteroatoms selected independently from N, O and S, and the heterocyclyl is optionally substituted with 1, 2, 3 or 4 independently selected substituents, and provided that the heterocyclyl comprises at least one nitrogen atom,
[0886] or R^{H} is

[chemical structure]

where X is O, NR^{L}, S, or CH₂; and R^{L} is hydrogen, a ligand, a linker covalently bonded to one or more ligands, aliphatic and aromatic alkyl, alkylester, alkylamine, dimethylamino alkyl, alkylether, alkylthioether, heteroaromatic alkyl, allyl, vinyl, alkyl groups functionalized with disulfide, oxime, ketone, acetal, hemiacetal, cleavable peptides, or cleavable sugars; and

[0887] R¹³ and R¹⁴ are independently -L²-R^{H2} or C₁-C₆alkyl, where:
[0888] L² is a linker; and
[0889] R^{H2} is 4-8 membered heterocyclyl comprising 1, 2 or 3 heteroatoms selected independently from N, O and S, and the heterocyclyl is optionally substituted with 1, 2, 3 or 4 independently selected substituents, and
[0890] provided that at least one of R¹³ and R¹⁴ is -L²-R^{H2}, and
[0891] provided that only one of R² and R³ is a reactive phosphorous group; and
[0892] R⁵ is not morpholin-4-yl unless R⁴ and R² taken together are 4′-C(R¹⁰R¹¹)ᵥ—Y-2′ or 4′-Y—C(R¹⁰R¹¹)ᵥ-2′.

[0893] Embodiment 112: The compound of Embodiment 111, wherein R⁵ is -L¹-R^{H}.

[0894] Embodiment 113: The compound of Embodiment 112, wherein L¹ is L³ or C₁₋₃₀alkylene.

[0895] Embodiment 114: The compound of Embodiment 112, wherein L¹ is O.

[0896] Embodiment 115: The compound of Embodiment 112, wherein L¹ is —(CH₂)ₙ—, where n is 0 or an integer selected from 1 to 30 (e.g., n is 1, 2, 3, 4, 5, 6, 7, 8, 9, 10, 11, 12, 13, 14, 15, 16, 16, 17, 18, 19, 20, 21, 22, 23, 24, 25, 26, 27, 28, 29 or 30, such as n is 1, 2, 3, 4, 5 or 6, preferably n is 0 or 1).

[0897] Embodiment 116: The compound of any one of Embodiments 112-115, wherein R^{H} is an optionally substituted 6-membered heterocyclyl comprising a nitrogen atom and 0, 1 or 2 additional heteroatoms selected independently from N, O and S.

[0898] Embodiment 117: The compound of any one of Embodiments 112-116, wherein R^{H} is

[chemical structure]

where X is O, NR^{L}, S, or CH₂; and R^{L} is hydrogen, a ligand, a linker covalently bonded to one or more ligands, aliphatic and aromatic alkyl, alkylester, alkylamine, dimethylamino alkyl, alkylether, alkylthioether, heteroaromatic alkyl, allyl, vinyl, alkyl groups functionalized with disulfide, oxime, ketone, acetal, hemiacetal, cleavable peptides, or cleavable sugars.

[0899] Embodiment 118: The compound of Embodiment 117, wherein X is O.

[0900] Embodiment 119: The compound of Embodiment 117, wherein X is NR^{L}.

[0901] Embodiment 120: The compound of Embodiment 119, wherein R^{L} is hydrogen.

[0902] Embodiment 121: The compound of Embodiment 119, wherein R^{L} is a ligand or linker covalently bonded to one or more independently selected ligands.

[0903] Embodiment 122: The compound of Embodiment 119, wherein R^{L} is aliphatic and aromatic alkyl, alkylester, alkylamine, dimethylamino alkyl, alkylether, alkylthioether, heteroaromatic alkyl, allyl, vinyl, alkyl groups functionalized with disulfide, oxime, ketone, acetal, hemiacetal, cleavable peptides, or cleavable sugars.

[0904] Embodiment 123: The compound of any one of Embodiments 111-114, wherein R^{H} is

[chemical structure]

[0905] Embodiment 124: The compound of Embodiment 123, wherein X is O.

[0906] Embodiment 125: The compound of Embodiment 123, wherein X is NR^{L}.

[0907] Embodiment 126: The compound of Embodiment 123, wherein R^{L} is hydrogen.

[0908] Embodiment 127: The compound of Embodiment 123, wherein R^{L} is a ligand or linker covalently bonded to one or more independently selected ligands.

[0909] Embodiment 128: The compound of Embodiment 123, wherein R^{L} is aliphatic and aromatic alkyl, alkylester, alkylamine, dimethylamino alkyl, alkylether, alkylthioether, heteroaromatic alkyl, allyl, vinyl, alkyl groups functionalized with disulfide, oxime, ketone, acetal, hemiacetal, cleavable peptides, or cleavable sugars.

[0910] Embodiment 129: The compound of Embodiment 111, wherein R⁵ is —O—N(R¹³)R¹⁴.

[0911] Embodiment 130: The compound of Embodiment 129, wherein R¹³ and R¹⁴ are same.

[0912] Embodiment 131: The compound of Embodiment 129, wherein R¹³ and R¹⁴ are different.

[0913] Embodiment 132: The compound of any one of Embodiments 129-131, wherein one of R¹³ and R¹⁴ is -L²-R^{H2}.

[0914] Embodiment 133: The compound of any one of Embodiments 129-132, wherein L² is a bond or an optionally substituted alkylene.

[0915] Embodiment 134: The compound of Embodiment 133, wherein L² is a bond.

[0916] Embodiment 135: The compound of Embodiment 133, wherein L² is —Z—(CH₂)ₘ—, where Z is absent, aryl, heteroaryl, cycloalkyl or heterocyclyl; and m is 0 or an integer selected from 1 to 20 (e.g., m is 1, 2, 3, 4, 5, 6, 7, 8, 9, 10, 11, 12, 13, 14 or 15, such as m is 1, 2, 3, 4, 5 or 6).

[0917] Embodiment 136: The compound of any one of Embodiments 129-135, wherein one of R¹³ and R¹⁴ is —(CH₂)ₘ—R^{H2} or

[chemical structure]

[0918] Embodiment 137: The compound of any one of Embodiments 129-136, wherein R^{H2} is an optionally substituted 6-membered heterocyclyl comprising a nitrogen atom and 0, 1 or 2 additional heteroatoms selected independently from N, O and S.

[0919] Embodiment 138: The compound of Embodiment 137, wherein R^{H2}

[chemical structure]

where X is O, NR^{L}, S, or CH₂; and R^{L} is hydrogen, a ligand, a linker covalently bonded to one or more ligands, aliphatic and aromatic alkyl, alkylester, alkylamine, dimethylamino alkyl, alkylether, alkylthioether, heteroaromatic alkyl, allyl, vinyl, alkyl groups functionalized with disulfide, oxime, ketone, acetal, hemiacetal, cleavable peptides, or cleavable sugars.

[0920] Embodiment 139: The compound of Embodiment 138, wherein X is O.

[0921] Embodiment 140: The compound of Embodiment 138, wherein X is NR^{L}.

[0922] Embodiment 141: The compound of Embodiment 140, wherein R^{L} is hydrogen.

[0923] Embodiment 142: The compound of Embodiment 140, wherein R^{L} is a ligand or linker covalently bonded to one or more independently selected ligands.

[0924] Embodiment 143: The compound of Embodiment 140, wherein R^{L} is aliphatic and aromatic alkyl, alkylester, alkylamine, dimethylamino alkyl, alkylether, alkylthioether, heteroaromatic alkyl, allyl, vinyl, alkyl groups functionalized with disulfide, oxime, ketone, acetal, hemiacetal, cleavable peptides, or cleavable sugars.

[0925] Embodiment 144: The compound of any one of Embodiments 129-143, wherein R^{H2} is

[chemical structure]

where X is O, NR^{L}, S, or CH₂; and R^{L} is hydrogen, a ligand, a linker covalently bonded to one or more ligands, aliphatic and aromatic alkyl, alkylester, alkylamine, dimethylamino alkyl, alkylether, alkylthioether, heteroaromatic alkyl, allyl, vinyl, alkyl groups functionalized with disulfide, oxime, ketone, acetal, hemiacetal, cleavable peptides, or cleavable sugars.

[0926] Embodiment 145: The compound of Embodiment 144, wherein X is O.

[0927] Embodiment 146: The compound of Embodiment 144, wherein X is NR^{L}.

[0928] Embodiment 147: The compound of Embodiment 146, wherein R^{L} is hydrogen.

[0929] Embodiment 148: The compound of Embodiment 146, wherein R^{L} is a ligand or linker covalently bonded to one or more independently selected ligands.

[0930] Embodiment 149: The compound of Embodiment 146, wherein R^{L} is aliphatic and aromatic alkyl, alkylester, alkylamine, dimethylamino alkyl, alkylether, alkylthioether, heteroaromatic alkyl, allyl, vinyl, alkyl groups functionalized with disulfide, oxime, ketone, acetal, hemiacetal, cleavable peptides, or cleavable sugars.

[0931] Embodiment 150: The compound of any one of Embodiments 129-149, wherein one of R¹³ and R¹⁴ is an optionally substituted C₁-C₆alkyl.

[0932] Embodiment 151: The compound of Embodiment 150, wherein one of R¹³ and R¹⁴ is methyl.

[0933] Embodiment 152: The compound of any one of Embodiments 111-151, wherein X^{S} is O or CH₂.

[0934] Embodiment 153: The compound of any one of Embodiments 111-152, wherein X^{S} is O.

[0935] Embodiment 154: The compound of any one of Embodiments 111-153, wherein R³ is a reactive phosphorous group, hydroxyl, or protected hydroxyl.

[0936] Embodiment 155: The compound of Embodiment 154, wherein R³ is a reactive phosphorous group.

[0937] Embodiment 156: The compound of any one of Embodiments 154-155, wherein R² is hydroxyl, protected hydroxyl, halogen, optionally substituted C₁₋₃₀ alkoxy (e.g., methoxy, 2-methoxyethoxy), alkoxyalkyl (e.g., 2-methoxyethyl), hydrogen, optionally substituted C₁₋₃₀ alkyl, optionally substituted C₂₋₃₀alkenyl, optionally substituted C₂₋₃₀alkynyl, alkoxyalkylamine, alkoxyoxycarboxylate, amino, alkylamino, dialkylamino, 5-8 membered heterocyclyl, —O—C₄₋₃₀alkyl-ON(CH₂R⁸)(CH₂R⁹), or —O—C₄₋₃₀alkyl-ON(CH₂R⁸)(CH₂R⁹); or R² and R⁴ taken together are 4′-C(R¹⁰R¹¹)ᵥ—Y-2′ or 4′-Y—C(R¹⁰R¹¹)ᵥ-2′.

[0938] Embodiment 157: The compound of any one of Embodiments 154-156, wherein R² is hydroxyl, protected hydroxyl, halogen, optionally substituted C₁₋₃₀ alkoxy (e.g., methoxy, 2-methoxyethoxy), alkoxyalkyl (e.g., 2-methoxyethyl), hydrogen, amino, alkylamino, or dialkylamino; or R² and R⁴ taken together are 4′-C(R¹⁰R¹¹)ᵥ—Y-2′ or 4′-Y—C(R¹⁰R¹¹)ᵥ-2′.

[0939] Embodiment 158: The compound of any one of Embodiments 154-157, wherein R² is hydrogen, hydroxyl, protected hydroxyl, fluoro, methoxy, ethoxy, or 2-methoxyethoxy; or R² and R⁴ taken together are 4′-C(R¹⁰R¹¹)ᵥ—Y-2′ or 4′-Y—C(R¹⁰R¹¹)ᵥ-2′.

[0940] Embodiment 159: The compound of any one of Embodiments 154-158, wherein R² is hydrogen, hydroxyl, protected hydroxyl, fluoro, or methoxy.

[0941] Embodiment 160: The compound of any one of Embodiments 154-159, wherein R² and R⁴ taken together are 4′-C(R¹⁰R¹¹)ᵥ—Y-2′ or 4′-Y—C(R¹⁰R¹¹)ᵥ-2′.

[0942] Embodiment 161: The compound of Embodiment 160, wherein R² and R⁴ taken together are 4′-C(R¹⁰R¹¹)ᵥ—Y-2′, wherein v is 1 or 2.

[0943] Embodiment 162: The compound of Embodiment 160 or 161, wherein one of R¹⁰ and R¹¹ is H and the other is independently H or optionally substituted C₁-C₆alkyl.

[0944] Embodiment 163: The compound of Embodiment 162 wherein R² and R⁴ taken together are 4′-CH₂—O-2′.

[0945] Embodiment 164: The compound of any one of Embodiments 154-159, wherein R⁴ is H.

[0946] Embodiment 165: The compound of any one of Embodiments 111-153, wherein R² is a reactive phosphorous group, hydroxyl, or protected hydroxyl.

[0947] Embodiment 166: The compound of Embodiment 165, wherein R² is a reactive phosphorous group.

[0948] Embodiment 167: The compound of any one of Embodiments 165-166, wherein R³ is hydroxyl, protected hydroxyl, halogen, optionally substituted C₁₋₃₀ alkoxy (e.g., methoxy, 2-methoxyethoxy), alkoxyalkyl (e.g., 2-methoxyethyl), hydrogen, optionally substituted C₁₋₃₀ alkyl, optionally substituted C₂₋₃₀alkenyl, optionally substituted C₂₋₃₀alkynyl, alkoxyalkylamine, alkoxyoxycarboxylate, amino, alkylamino, dialkylamino, 5-8 membered heterocyclyl, —O—C₄₋₃₀alkyl-ON(CH₂R⁸) (CH₂R⁹), or —O—C₄₋₃₀alkyl-ON(CH₂R⁸)(CH₂R⁹).

[0949] Embodiment 168: The compound of any one of Embodiments 165-167, wherein R³ is hydroxyl, protected hydroxyl, halogen, optionally substituted C₁₋₃₀ alkoxy (e.g., methoxy, 2-methoxyethoxy), alkoxyalkyl (e.g., 2-methoxyethyl), hydrogen, amino, alkylamino, or dialkylamino.

[0950] Embodiment 169: The compound of any one of Embodiments 165-168, wherein R³ is hydrogen, hydroxyl, protected hydroxyl, fluoro, methoxy, ethoxy, or 2-methoxyethoxy; or R² and R⁴ taken together are 4′-C(R¹⁰R¹¹)ᵥ—Y-2′ or 4′-Y—C(R¹⁰R¹¹)ᵥ-2′.

[0951] Embodiment 170: The compound of any one of Embodiments 165-169, wherein R³ is hydrogen, hydroxyl, protected hydroxyl, fluoro, or methoxy.

[0952] Embodiment 171: The compound of any one of Embodiments 165-170, wherein R⁴ is H.

[0953] Embodiment 172: The compound of Embodiment 111, wherein compound is selected from formulae (I-A)-(I-D):

[chemical structure]

[0954] wherein:
[0955] n is 0 or an integer selected from 1 to 30 (e.g., n is 1, 2, 3, 4, 5, 6, 7, 8, 9, 10, 11, 12, 13, 14, 15, 16, 16, 17, 18, 19, 20, 21, 22, 23, 24, 25, 26, 27, 28, 29 or 30, such as n is 1, 2, 3, 4, 5 or 6, preferably n is 0 or 1);
[0956] R² is hydrogen, hydroxyl, protected hydroxyl, halogen, optionally substituted C₁₋₃₀ alkoxy (e.g., methoxy, 2-methoxyethoxy), alkoxyalkyl (e.g., 2-methoxyethyl), amino, alkylamino, or dialkylamino;
[0957] R³ is a reactive phosphorous group, hydroxyl, protected hydroxyl or a reactive phosphorous group;
[0958] R⁴ is hydrogen or R² and R⁴ taken together are 4′-C(R¹⁰R¹¹)ᵥ—Y-2′ or 4′-Y—C(R¹⁰R¹¹)ᵥ-2′.

[0959] Embodiment 174: The compound of Embodiment 172 or 173, wherein R³ is a reactive phosphorous group (e.g., a phosphoramidite, such as 3′-[(2-cyanoethyl)-(N,N-diisopropyl)]-phosphoramidite, 3′-[(2-cyanoethyl)-(N,N-diisopropyl)]-phosphoramidite, or 3′-[(ß-thiobenzoylethyl)-(1-pyrrolidinyl)]-thiophosphoramidite).

[0960] Embodiment 173: The compound of Embodiment 172, wherein X^{S} is O.

[0961] Embodiment 175: The compound of Embodiment 172 or 173, wherein R³ is hydroxyl or protected hydroxyl.

[0962] Embodiment 176: The compound of any one of Embodiments 172-175, wherein R² is hydrogen, hydroxyl, protected hydroxyl, halogen, optionally substituted C₁₋₃₀ alkoxy (e.g., methoxy, 2-methoxyethoxy), or alkoxyalkyl (e.g., 2-methoxyethyl).

[0963] Embodiment 177: The compound of any one of Embodiments 172-176, wherein R² is hydrogen, hydroxyl, protected hydroxyl, fluoro, or methoxy.

[0964] Embodiment 178: The compound of any one of Embodiments 172-177, wherein R⁴ is H.

[0965] Embodiment 179: The compound of any one of Embodiments 172-175, wherein R² and R⁴ taken together are 4′-C(R¹⁰R¹¹)ᵥ—Y-2′ or 4′-Y—C(R¹⁰R¹¹)ᵥ-2′.

[0966] Embodiment 180: The compound of Embodiment 179, wherein one of R¹⁰ and R¹¹ is H and the other is independently H or optionally substituted C₁-C₆alkyl.

[0967] Embodiment 181: The compound of Embodiment 180, wherein R² and R⁴ taken together are 4′-CH₂—O-2′.

[0968] Embodiment 182: The compound of any one of Embodiments 172-181, wherein one of R¹³ and R¹⁴ is

[chemical structure]

and the other of R¹³ and R¹⁴ is C₁-C₆alkyl,

[chemical structure]

[0969] Embodiment 183: The compound of any one of Embodiments 172-182, wherein R¹³ and R¹⁴ are the same.

[0970] Embodiment 184: The compound of any one of Embodiments 172-182, wherein R¹³ and R¹⁴ are different.

[0971] Embodiment 185: The compound of Embodiment 184, wherein one of R¹³ and R¹⁴ is C₁-Calkyl (e.g., methyl).

[0972] Embodiment 186: The compound of any one of Embodiments 172-185, wherein X is NR^{L}.

[0973] Embodiment 187: The compound of Embodiment 186, wherein R^{L} is a ligand or linker covalently bonded to one or more independently selected ligands.

[0974] Embodiment 188: The compound of Embodiment 186, wherein R^{L} is aliphatic and aromatic alkyl, alkylester, alkylamine, dimethylamino alkyl, alkylether, alkylthioether, heteroaromatic alkyl, allyl, vinyl, alkyl groups functionalized with disulfide, oxime, ketone, acetal, hemiacetal, cleavable peptides, or cleavable sugars.

[0975] Embodiment 189: The compound of any one of Embodiment 172-185, wherein X is O, S, CH₂ or NH.

[0976] Embodiment 190: The compound of Embodiment 111, wherein the compound is of Formula (I-E):

[chemical structure]

[0977] wherein:
[0978] R³ is a reactive phosphorous group, hydroxyl, or protected hydroxyl;
[0979] R⁵ is -L¹-R^{H}; and
[0980] X^{S}, B, Y, R¹⁰ and R¹¹ are as defined in claim 111.

[0981] Embodiment 191: The compound of Embodiment 190, wherein compound is of Formula (I-Ea), (I-E¹) or (I-E²):

[chemical structure]

[0982] wherein
[0983] n is 0 or an integer selected from 1 to 30 (e.g., n is 1, 2, 3, 4, 5, 6, 7, 8, 9, 10, 11, 12, 13, 14, 15, 16, 16, 17, 18, 19, 20, 21, 22, 23, 24, 25, 26, 27, 28, 29 or 30, such as n is 1, 2, 3, 4, 5 or 6, preferably n is 0 or 1);
[0984] X is O, NR^{L}, S, or CH₂; and
[0985] R^{L} is H, a ligand, a linker covalently bonded to one or more ligands, aliphatic and aromatic alkyl, alkylester, alkylamine, dimethylamino alkyl, alkylether, alkylthioether, heteroaromatic alkyl, allyl, vinyl, alkyl groups functionalized with disulfide, oxime, ketone, acetal, hemiacetal, cleavable peptides, or cleavable sugars, and optionally, the compound is of Formula (I-Eb) or (I-Ec):

[chemical structure]

[0986] Embodiment 192: The compound of Embodiment 191, wherein X is O or CH₂.

[0987] Embodiment 193: The compound of Embodiment 191 or 192, wherein X is O.

[0988] Embodiment 194: The compound of any one of Embodiments 190-193, wherein Y is O.

[0989] Embodiment 195: The compound of any one of Embodiments 190-194, wherein one of R¹⁰ is H and the other is H or C₁₋₆alkyl (e.g., methyl).

[0990] Embodiment 196: The compound of any one of Embodiments 190-195, wherein X^{S} is O.

[0991] Embodiment 197: The compound of any one of Embodiments 190-196, wherein R³ is a reactive phosphorous group (e.g., a phosphoramidite, such as 3′-[(2-cyanoethyl)-(N,N-diisopropyl)]-phosphoramidite, 3′-[(2-cyanoethyl)-(N,N-diisopropyl)]-phosphoramidite, or 3′-[(β-thiobenzoylethyl)-(1-pyrrolidinyl)]-thiophosphoramidite).

[0992] Embodiment 198: The compound of any one of Embodiments 190-197, wherein R³ is hydroxyl or protected hydroxyl.

[0993] Embodiment 199: The compound of Embodiment 190, wherein the compound is of Formula (I-Ed), (I-Ee), (I-E³) or (I-E⁴):

[chemical structure]

[0994] where n is 0 or an integer selected from 1 to 30 (e.g., n is 1, 2, 3, 4, 5, 6, 7, 8, 9, 10, 11, 12, 13, 14, 15, 16, 16, 17, 18, 19, 20, 21, 22, 23, 24, 25, 26, 27, 28, 29 or 30, such as n is 1, 2, 3, 4, 5 or 6, preferably n is 0 or 1); and
[0995] R^{L} is H, a ligand, a linker covalently bonded to one or more ligands, aliphatic and aromatic alkyl, alkylester, alkylamine, dimethylamino alkyl, alkylether, alkylthioether, heteroaromatic alkyl, allyl, vinyl, alkyl groups functionalized with disulfide, oxime, ketone, acetal, hemiacetal, cleavable peptides, or cleavable sugars, and optionally, the compound is of Formula (I-Ef) or (I-Eg):

[chemical structure]

[0996] Embodiment 200: An oligonucleotide prepared using a compound of any one of Embodiments 111-199.

[0997] Embodiment 201: An oligonucleotide comprising at least one nucleoside of Formula (II):

[chemical structure]

[0998] wherein:
[0999] B an optionally modified nucleobase;
[1000] X^{S} is O, CH₂, S, or NH;
[1001] R²² is hydroxyl, protected hydroxyl, halogen, optionally substituted C₁₋₃₀ alkoxy (e.g., methoxy, 2-methoxyethoxy), alkoxyalkyl (e.g., 2-methoxyethyl), hydrogen, optionally substituted C₁₋₃₀ alkyl, optionally substituted C₂₋₃₀alkenyl, optionally substituted C₂₋₃₀alkynyl, alkoxyalkylamine, alkoxyoxycarboxylate, amino, alkylamino, dialkylamino, 5-8 membered heterocyclyl, —O—C₄₋₃₀alkyl-ON(CH₂R⁸) (CH₂R⁹), —O—C₄₋₃₀alkyl-ON(CH₂R⁸) (CH₂R⁹), a ligand, a linker covalently bonded to one or more ligands or a bond to an internucleotide linkage to a subsequent nucleoside;
[1002] R²³ is a bond to an internucleotide linkage to a subsequent nucleoside, hydroxyl, protected hydroxyl, halogen, optionally substituted C₂₋₃₀alkynyl, optionally substituted C₁₋₃₀ alkoxy (e.g., methoxy, 2-methoxyethoxy), alkoxyalkyl (e.g., 2-methoxyethyl), hydrogen, optionally substituted C₁₋₃₀ alkyl, optionally substituted C₂₋₃₀alkenyl, alkoxyalkylamine, alkoxyoxycarboxylate, amino, alkylamino, dialkylamino, 5-8 membered heterocyclyl, —O—C₄₋₃₀alkyl-ON(CH₂R⁸) (CH₂R⁹), —O—C₄₋₃₀alkyl-ON(CH₂R⁸) (CH₂R⁹), phosphate group, a ligand, or a linker covalently bonded to one or more ligands;
[1003] R²⁴ is hydrogen, optionally substituted C₁₋₆alkyl, optionally substituted C₂₋₆alkenyl, optionally substituted C₂₋₆alkynyl, or optionally substituted C₁₋₆alkoxy;
[1004] or R²² and R²⁴ taken together are 4′-C(R¹⁰R¹¹)ᵥ—Y-2′ or 4′-Y—C(R¹⁰R¹¹)ᵥ-2′;
[1005] Y is —O—, —CH₂—, —CH(Me)-, —C(CH₃)₂—, —S—, —N(R¹²)—, —C(O)—, —C(S)—, —S(O)—, —S(O)₂—, —OC(O)—, —C(O)O—, —N(R¹²)C(O)—, or —C(O)N(R¹²)—;
[1006] R¹⁰ and R¹¹ independently are H, optionally substituted C₁-C₆alkyl, optionally substituted C₂-C₆alkenyl or optionally substituted C₂-C₆alkynyl;
[1007] R¹² is hydrogen, optionally substituted C₁₋₃₀alkyl, optionally substituted C₁-C₃₀alkoxy, C₁₄haloalkyl, optionally substituted C₂₋₄alkenyl, optionally substituted C₂₋₄alkynyl, optionally substituted C₁₋₃₀alkyl-CO₂H, or a nitrogen-protecting group;
[1008] v is 1, 2 or 3; and
[1009] R⁵ is -L¹-R^{H}, —O—N(R¹³)R¹⁴;
[1010] L¹ is a bond, -L³-, C₁₋₃₀alkylene, C₂₋₃₀alkenylene, C₂₋₃₀alkynylene, *-L³-C₁₋₃₀alkylene *-L³-C₂₋₃₀alkenylene, or *-L³-C₂₋₃₀alkynylene;
[1011] L³ is —O—, —N(R^{L3})—, —S—, —C(O)—, —S(O)—, —S(O)₂—, —P(X^{L3}) (Y^{L3}R^{L3B})—;
[1012] where R^{L3} is hydrogen, optionally substituted C₁₋₃₀alkyl, optionally substituted C₁-C₃₀alkoxy, C₁₄haloalkyl, optionally substituted C₂₋₄alkenyl, optionally substituted C₂₋₄alkynyl, optionally substituted C₁₋₃₀alkyl-CO₂H, or a nitrogen-protecting group;
[1013] X^{L2} is O or S;
[1014] Y^{L3} is O, S, NH, or a bond; and
[1015] R^{L3B} is H or optionally substituted alkyl; and
[1016] * is bond to R^{H};
[1017] and
[1018] R^{H} is 4-8 membered heterocyclyl comprising 1, 2 or 3 heteroatoms selected independently from N, O and S, and the heterocyclyl is optionally substituted with 1, 2, 3 or 4 independently selected substituents, and provided that the heterocyclyl comprises at least one nitrogen atom, or R^{H} is

[chemical structure]

where X is O, NR^{L}, S, or CH₂; and R^{L} is hydrogen, a ligand, a linker covalently bonded to one or more ligands, aliphatic and aromatic alkyl, alkylester, alkylamine, dimethylamino alkyl, alkylether, alkylthioether, heteroaromatic alkyl, allyl, vinyl, alkyl groups functionalized with disulfide, oxime, ketone, acetal, hemiacetal, cleavable peptides, or cleavable sugars; and
[1019] R¹³ and R¹⁴ are independently -L²-R^{H2}, where:
[1020] L² is a linker; and
[1021] R^{H2} is 4-8 membered heterocyclyl comprising 1, 2 or 3 heteroatoms selected independently from N, O and S, and the heterocyclyl is optionally substituted with 1, 2, 3 or 4 independently selected substituents, and
[1022] provided that at least one of R¹³ and R¹⁴ is -L²-R^{H2}, and
[1023] provided that one of R²² and R²³ is a bond to an internucleotide linkage to a subsequent nucleoside and only one of R²² and R²³ is a bond to an internucleotide linkage to a subsequent nucleoside.

[1024] Embodiment 202: The oligonucleotide of Embodiment 201, wherein R⁵ is -L¹-R^{H}.

[1025] Embodiment 203: The oligonucleotide of Embodiment 202, wherein L¹ is -L³- or C₁₋₃₀alkylene.

[1026] Embodiment 204: The oligonucleotide of Embodiment 202, wherein L¹ is O.

[1027] Embodiment 205: The oligonucleotide of Embodiment 202, wherein L¹ is —(CH₂)ₙ—, where n is 0 or an integer selected from 1 to 30 (e.g., n is 1, 2, 3, 4, 5, 6, 7, 8, 9, 10, 11, 12, 13, 14, 15, 16, 16, 17, 18, 19, 20, 21, 22, 23, 24, 25, 26, 27, 28, 29 or 30, such as n is 1, 2, 3, 4, 5 or 6, preferably n is 0 or 1).

[1028] Embodiment 206: The oligonucleotide of any one of Embodiments 202-205, wherein R^{H} is an optionally substituted 6-membered heterocyclyl comprising a nitrogen atom and 0, 1 or 2 additional heteroatoms selected independently from N, O and S.

[1029] Embodiment 207: The oligonucleotide of any one of Embodiments 202-206, wherein R^{H} is

[chemical structure]

where X is O, NR^{L}, S, or CH₂; and R^{L} is hydrogen, a ligand, a linker covalently bonded to one or more ligands, aliphatic and aromatic alkyl, alkylester, alkylamine, dimethylamino alkyl, alkylether, alkylthioether, heteroaromatic alkyl, allyl, vinyl, alkyl groups functionalized with disulfide, oxime, ketone, acetal, hemiacetal, cleavable peptides, or cleavable sugars.

[1030] Embodiment 208: The oligonucleotide of Embodiment 207, wherein X is O.

[1031] Embodiment 209: The oligonucleotide of Embodiment 207, wherein X is NR^{L}.

[1032] Embodiment 210: The oligonucleotide of Embodiment 209, wherein R^{L} is hydrogen.

[1033] Embodiment 211: The oligonucleotide of Embodiment 209, wherein R^{L} is a ligand or linker covalently bonded to one or more independently selected ligands.

[1034] Embodiment 212: The oligonucleotide of Embodiment 209, wherein R^{L} is aliphatic and aromatic alkyl, alkylester, alkylamine, dimethylamino alkyl, alkylether, alkylthioether, heteroaromatic alkyl, allyl, vinyl, alkyl groups functionalized with disulfide, oxime, ketone, acetal, hemiacetal, cleavable peptides, or cleavable sugars.

[1035] Embodiment 213: The oligonucleotide of any one of Embodiments 201-205, wherein R^{H} is

[chemical structure]

[1036] Embodiment 214: The oligonucleotide of Embodiment 213, wherein X is O.

[1037] Embodiment 215: The oligonucleotide of Embodiment 213, wherein X is NR^{L}.

[1038] Embodiment 216: The oligonucleotide of Embodiment 215, wherein R^{L} is hydrogen.

[1039] Embodiment 217: The oligonucleotide of Embodiment 215, wherein R^{L} is a ligand or linker covalently bonded to one or more independently selected ligands.

[1040] Embodiment 218: The oligonucleotide of Embodiment 215, wherein R^{L} is aliphatic and aromatic alkyl, alkylester, alkylamine, dimethylamino alkyl, alkylether, alkylthioether, heteroaromatic alkyl, allyl, vinyl, alkyl groups functionalized with disulfide, oxime, ketone, acetal, hemiacetal, cleavable peptides, or cleavable sugars.

[1041] Embodiment 219: The oligonucleotide of Embodiment 201, wherein R⁵ is —O—N(R¹³)R¹⁴

[1042] Embodiment 220: The oligonucleotide of Embodiment 219, wherein R¹³ and R¹⁴ are same.

[1043] Embodiment 221: The oligonucleotide of Embodiment 219, wherein R¹³ and R¹⁴ are different.

[1044] Embodiment 222: The oligonucleotide of any one of Embodiments 219-221, wherein one of R¹³ and R¹⁴ is -L²-R^{H2}.

[1045] Embodiment 223: The oligonucleotide of any one of Embodiments 219-222, wherein L² is a bond or an optionally substituted alkylene.

[1046] Embodiment 224: The oligonucleotide of Embodiment 223, wherein L² is a bond.

[1047] Embodiment 225: The oligonucleotide of Embodiment 223, wherein L² comprises —Z—(CH₂)ₘ—, where Z is absent, aryl, heteroaryl, cycloalkyl or heterocyclyl; and m is 0 or an integer selected from 1 to 20 (e.g., m is 1, 2, 3, 4, 5, 6, 7, 8, 9, 10, 11, 12, 13, 14 or 15, such as m is 1, 2, 3, 4, 5 or 6).

[1048] Embodiment 226: The oligonucleotide of any one of Embodiments 219-225, wherein one of R¹³ and R¹⁴ is —(CH₂)ₘ—R^{H2} or

[chemical structure]

[1049] Embodiment 227: The oligonucleotide of any one of Embodiments 219-226, wherein R^{H2} is an optionally substituted 6-membered heterocyclyl comprising a nitrogen atom and 0, 1 or 2 additional heteroatoms selected independently from N, O and S.

[1050] Embodiment 228: The oligonucleotide of Embodiment 227, wherein R^{H2} is

[chemical structure]

where X is O, NR^{L}, S, or CH₂; and R^{L} is hydrogen, a ligand, a linker covalently bonded to one or more ligands, aliphatic and aromatic alkyl, alkylester, alkylamine, dimethylamino alkyl, alkylether, alkylthioether, heteroaromatic alkyl, allyl, vinyl, alkyl groups functionalized with disulfide, oxime, ketone, acetal, hemiacetal, cleavable peptides, or cleavable sugars.

[1051] Embodiment 229: The oligonucleotide of Embodiment 228, wherein X is O.

[1052] Embodiment 230: The oligonucleotide of Embodiment 228 wherein X is NR^{L}.

[1053] Embodiment 231: The oligonucleotide of Embodiment 230, wherein R^{L} is hydrogen.

[1054] Embodiment 232: The oligonucleotide of Embodiment 230, wherein R^{L} is a ligand or linker covalently bonded to one or more independently selected ligands.

[1055] Embodiment 233: The oligonucleotide of Embodiment 230, wherein R^{L} is aliphatic and aromatic alkyl, alkylester, alkylamine, dimethylamino alkyl, alkylether, alkylthioether, heteroaromatic alkyl, allyl, vinyl, alkyl groups functionalized with disulfide, oxime, ketone, acetal, hemiacetal, cleavable peptides, or cleavable sugars.

[1056] Embodiment 234: The oligonucleotide of any one of Embodiments 219-233, wherein R^{H2} is

[chemical structure]

where X is O, NR^{L}, S, or CH₂; and R^{L} is hydrogen, a ligand, a linker covalently bonded to one or more ligands, aliphatic and aromatic alkyl, alkylester, alkylamine, dimethylamino alkyl, alkylether, alkylthioether, heteroaromatic alkyl, allyl, vinyl, alkyl groups functionalized with disulfide, oxime, ketone, acetal, hemiacetal, cleavable peptides, or cleavable sugars.

[1057] Embodiment 235: The oligonucleotide of Embodiment 234, wherein X is O.

[1058] Embodiment 236: The oligonucleotide of Embodiment 234, wherein X is NR^{L}.

[1059] Embodiment 237: The oligonucleotide of Embodiment 236, wherein R^{L} is hydrogen.

[1060] Embodiment 238: The oligonucleotide of Embodiment 236, wherein R^{L} is a ligand or linker covalently bonded to one or more independently selected ligands.

[1061] Embodiment 239: The oligonucleotide of Embodiment 236, wherein R^{L} is aliphatic and aromatic alkyl, alkylester, alkylamine, dimethylamino alkyl, alkylether, alkylthioether, heteroaromatic alkyl, allyl, vinyl, alkyl groups functionalized with disulfide, oxime, ketone, acetal, hemiacetal, cleavable peptides, or cleavable sugars.

[1062] Embodiment 240: The oligonucleotide of any one of Embodiments 219-239, wherein one of R¹³ and R¹⁴ is an optionally substituted C₁-C₆alkyl.

[1063] Embodiment 241: The oligonucleotide of Embodiment 240, wherein one of R¹³ and R¹⁴ is methyl.

[1064] Embodiment 242: The oligonucleotide of any one of Embodiments 201-241, wherein X^{S} is O or CH₂.

[1065] Embodiment 243: The oligonucleotide of any one of Embodiments 201-242, wherein X^{S} is O.

[1066] Embodiment 244: The oligonucleotide of any one of Embodiments 201-243, wherein R²³ is a bond to an internucleotide linkage to a subsequent nucleoside.

[1067] Embodiment 245: The oligonucleotide of Embodiment 244, wherein R²² is hydroxyl, protected hydroxyl, halogen, optionally substituted C₁₋₃₀ alkoxy (e.g., methoxy, 2-methoxyethoxy), alkoxyalkyl (e.g., 2-methoxyethyl), hydrogen, optionally substituted C₁₋₃₀ alkyl, optionally substituted C₂₋₃₀alkenyl, optionally substituted C₂₋₃₀alkynyl, alkoxyalkylamine, alkoxyoxycarboxylate, amino, alkylamino, dialkylamino, 5-8 membered heterocyclyl, —O—C₄₋₃₀alkyl-ON(CH₂R⁸)(CH₂R⁹), or —O—C₄₋₃₀alkyl-ON(CH₂R⁸)(CH₂R⁹); or R²⁴ and R²⁵ taken together are 4′-C(R¹⁰R¹¹)ᵥ—Y-2′ or 4′-Y—C(R¹⁰R¹¹)ᵥ-2′.

[1068] Embodiment 246: The oligonucleotide of any one of Embodiments 244-245, wherein R²² is hydroxyl, protected hydroxyl, halogen, optionally substituted C₁₋₃₀ alkoxy (e.g., methoxy, 2-methoxyethoxy), alkoxyalkyl (e.g., 2-methoxyethyl), hydrogen, amino, alkylamino, or dialkylamino; or R²² and R²⁴ taken together are 4′-C(R¹⁰R¹¹)ᵥ—Y-2′ or 4′-Y—C(R¹⁰R¹¹)ᵥ-2′.

[1069] Embodiment 247: The oligonucleotide of any one of Embodiments 244-246, wherein R²² is hydrogen, hydroxyl, protected hydroxyl, fluoro, methoxy, ethoxy, or 2-methoxyethoxy; or R²² and R²⁴ taken together are 4′-C(R¹⁰R¹¹)ᵥ—Y-2′ or 4′-Y—C(R¹⁰R¹¹)ᵥ-2′.

[1070] Embodiment 248: The oligonucleotide of any one of Embodiments 244-247, wherein R²² is hydrogen, hydroxyl, protected hydroxyl, fluoro, or methoxy.

[1071] Embodiment 249: The oligonucleotide of any one of Embodiments 244-247, wherein R²² and R²⁴ taken together are 4′-C(R¹⁰R¹¹)ᵥ—Y-2′ or 4′-Y—C(R¹⁰R¹¹)ᵥ-2′.

[1072] Embodiment 250: The oligonucleotide of Embodiment 249, wherein R² and R⁴ taken together are 4′-C(R¹⁰R¹¹)ᵥ—Y-2′, wherein v is 1 or 2.

[1073] Embodiment 251: The oligonucleotide of Embodiment 249 or 250, wherein one of R¹⁰ and R¹¹ is H and the other is independently H or optionally substituted C₁-C₆alkyl.

[1074] Embodiment 252: The oligonucleotide of Embodiment 251, wherein R²² and R²⁴ taken together are 4′-CH₂—O-2′.

[1075] Embodiment 253: The oligonucleotide of any one of Embodiments 244-248, wherein R²⁴ is H.

[1076] Embodiment 254: The oligonucleotide of any one of Embodiments 201-243, wherein R²² is a bond to an internucleotide linkage to a subsequent nucleoside.

[1077] Embodiment 255: The oligonucleotide of Embodiment 254, wherein R²³ is hydroxyl, protected hydroxyl, halogen, optionally substituted C₁₋₃₀ alkoxy (e.g., methoxy, 2-methoxyethoxy), alkoxyalkyl (e.g., 2-methoxyethyl), hydrogen, optionally substituted C₁₋₃₀ alkyl, optionally substituted C₂₋₃₀alkenyl, optionally substituted C₂₋₃₀alkynyl, alkoxyalkylamine, alkoxyoxycarboxylate, amino, alkylamino, dialkylamino, 5-8 membered heterocyclyl, —O—C₄₋₃₀alkyl-ON(CH₂R⁸) (CH₂R⁹), or —O—C₄₋₃₀alkyl-ON(CH₂R⁸) (CH₂R⁹).

[1078] Embodiment 256: The oligonucleotide of any one of Embodiments 254-255, wherein R²³ is hydroxyl, protected hydroxyl, halogen, optionally substituted C₁₋₃₀ alkoxy (e.g., methoxy, 2-methoxyethoxy), alkoxyalkyl (e.g., 2-methoxyethyl), hydrogen, amino, alkylamino, or dialkylamino.

[1079] Embodiment 257: The oligonucleotide of any one of Embodiments 254-256, wherein R²³ is hydrogen, hydroxyl, protected hydroxyl, fluoro, methoxy, ethoxy, or 2-methoxyethoxy; or R² and R⁴ taken together are 4′-C(R¹⁰R¹¹)ᵥ—Y-2′ or 4′-Y—C(R¹⁰R¹¹)ᵥ-2′.

[1080] Embodiment 258: The oligonucleotide of any one of Embodiments 254-257, wherein R²³ is hydrogen, hydroxyl, protected hydroxyl, fluoro, or methoxy.

[1081] Embodiment 259: The oligonucleotide of any one of Embodiments 254-258, wherein R²⁴ is H.

[1082] Embodiment 260: The oligonucleotide of Embodiment 201, wherein the nucleoside of Formula (II) is selected from formulae (II-A)-(II-D):

[chemical structure]

[1083] wherein:
[1084] R²² is hydrogen, hydroxyl, protected hydroxyl, halogen, optionally substituted C₁₋₃₀ alkoxy (e.g., methoxy, 2-methoxyethoxy), alkoxyalkyl (e.g., 2-methoxyethyl), amino, alkylamino, or dialkylamino;
[1085] R²³² is a bond to an internucleotide linkage to a subsequent nucleoside;
[1086] R²⁴ is hydrogen or R²² and R²⁴ taken together are 4′-C(R¹⁰R¹¹)ᵥ—Y-2′ or 4′-Y—C(R¹⁰R¹¹)ᵥ-2′.

[1087] Embodiment 261: The oligonucleotide of Embodiment 260, wherein X^{S} is O.

[1088] Embodiment 262: The oligonucleotide of Embodiment 260 or 261, wherein R²² is hydrogen, hydroxyl, protected hydroxyl, halogen, optionally substituted C₁₋₃₀ alkoxy (e.g., methoxy, 2-methoxyethoxy).

[1089] Embodiment 263: The oligonucleotide of any one of Embodiments 260-262, wherein R²² is hydrogen, hydroxyl, protected hydroxyl, fluoro, or methoxy.

[1090] Embodiment 264: The oligonucleotide of any one of Embodiments 260-263, wherein R²⁴ is H.

[1091] Embodiment 265: The oligonucleotide of Embodiments 260 or 261, wherein R²² and R²⁴ taken together are 4′-C(R¹⁰R¹¹)ᵥ—Y-2′ or 4′-Y—C(R¹⁰R¹¹)ᵥ-2′.

[1092] Embodiment 266: The oligonucleotide of Embodiment 265, wherein one of R¹⁰ and R¹¹ is H and the other is independently H or optionally substituted C₁-C₆alkyl.

[1093] Embodiment 267: The oligonucleotide of Embodiment 266, wherein R²² and R²⁴ taken together are 4′-CH₂—O-2′.

[1094] Embodiment 268: The oligonucleotide of any one of Embodiments 260-267, wherein one of R¹³ and R¹⁴ is

[chemical structure]

and the other of R¹³ and R¹⁴ is C₁-C₆alkyl,

[chemical structure]

[1095] Embodiment 269: The oligonucleotide of any one of Embodiments 260-268, wherein R¹³ and R¹⁴ are the same.

[1096] Embodiment 270: The oligonucleotide of any one of Embodiments 260-268, wherein R¹³ and R¹⁴ are different.

[1097] Embodiment 271: The oligonucleotide of Embodiment 265, wherein one of R¹³ and R¹⁴ is C₁-C₆alkyl (e.g., methyl).

[1098] Embodiment 272: The oligonucleotide of any one of Embodiments 260-271, wherein X is NR^{L}.

[1099] Embodiment 273: The oligonucleotide of Embodiment 272, wherein R^{L} is a ligand or linker covalently bonded to one or more independently selected ligands.

[1100] Embodiment 274: The oligonucleotide of Embodiment 272, wherein R^{L} is aliphatic and aromatic alkyl, alkylester, alkylamine, dimethylamino alkyl, alkylether, alkylthioether, heteroaromatic alkyl, allyl, vinyl, alkyl groups functionalized with disulfide, oxime, ketone, acetal, hemiacetal, cleavable peptides, or cleavable sugars.

[1101] Embodiment 275: The oligonucleotide of any one of Embodiments 260-271, wherein X is O, S, CH₂ or NH.

[1102] Embodiment 276: The oligonucleotide of Embodiment 201, wherein the nucleoside is of Formula (II-E):

[chemical structure]

[1103] wherein:
[1104] R²³ is a bond to an internucleotide linkage to a subsequent nucleoside;
[1105] R⁵ is -L¹-R^{H}; and
[1106] X^{S}, B, Y, R¹⁰ and R¹¹ are as defined in claim 111.

[1107] Embodiment 277: The oligonucleotide of Embodiment 276, wherein the nucleoside is of Formula (II-Ea), (II-E′) or (II-E″:

[chemical structure]

[1108] wherein
   [1109] n is 0 or an integer selected from 1 to 30 (e.g., n is 1, 2, 3, 4, 5, 6, 7, 8, 9, 10, 11, 12, 13, 14, 15, 16, 16, 17, 18, 19, 20, 21, 22, 23, 24, 25, 26, 27, 28, 29 or 30, such as n is 1, 2, 3, 4, 5 or 6, preferably n is 0 or 1);
[1110] X is O, NR^{L}, S, or CH₂; and
   [1111] R^{L} is H, a ligand, a linker covalently bonded to one or more ligands, aliphatic and aromatic alkyl, alkylester, alkylamine, dimethylamino alkyl, alkylether, alkylthioether, heteroaromatic alkyl, allyl, vinyl, alkyl groups functionalized with disulfide, oxime, ketone, acetal, hemiacetal, cleavable peptides, or cleavable sugars, and
[1112] optionally, the compound is of Formula (II-Eb) or (II-Ec):

[chemical structure]

[1113] Embodiment 278: The oligonucleotide of Embodiment 277, wherein X is O or CH₂.

[1114] Embodiment 279: The oligonucleotide of Embodiment 277 or 278, wherein X is O.

[1115] Embodiment 280: The oligonucleotide of any one of Embodiments 276-279, wherein Y is O.

[1116] Embodiment 281: The oligonucleotide of any one of Embodiments 276-280, wherein one of R¹⁰ is H and the other is H or C₁₋₆alkyl (e.g., methyl).

[1117] Embodiment 282: The oligonucleotide of any one of Embodiments 276-281, wherein X^{S} is O.

[1118] Embodiment 283: The oligonucleotide of Embodiment 276, wherein the nucleoside is of Formula (II-Ed), (II-Ee), (II-E³) or (II-E⁴):

[chemical structure]

[1119] where n is 0 or an integer selected from 1 to 30 (e.g., n is 1, 2, 3, 4, 5, 6, 7, 8, 9, 10, 11, 12, 13, 14, 15, 16, 16, 17, 18, 19, 20, 21, 22, 23, 24, 25, 26, 27, 28, 29 or 30, such as n is 1, 2, 3, 4, 5 or 6, preferably n is 0 or 1); and
[1120] R^{L} is H, a ligand, a linker covalently bonded to one or more ligands, aliphatic and aromatic alkyl, alkylester, alkylamine, dimethylamino alkyl, alkylether, alkylthioether, heteroaromatic alkyl, allyl, vinyl, alkyl groups functionalized with disulfide, oxime, ketone, acetal, hemiacetal, cleavable peptides, or cleavable sugars, and optionally, the compound is of Formula (II-Ef) or (II-Eg):

[chemical structure]

[1121] Embodiment 284: The oligonucleotide of any one of Embodiments 201-283, wherein the oligonucleotide comprises from 3 to 50 nucleotides.

[1122] Embodiment 285: The oligonucleotide of any one of Embodiments 201-284, wherein the oligonucleotide comprises at least one ribonucleotide.

[1123] Embodiment 286: The oligonucleotide of any one of Embodiments 201-285, wherein the oligonucleotide comprises at least one 2′-deoxyribonucleotide.

[1124] Embodiment 287: The oligonucleotide of any one of Embodiments 201-286, wherein the oligonucleotide comprises at least one nucleoside with a modified or non-natural nucleobase in addition to the nucleoside of Formula (II).

[1125] Embodiment 288: The oligonucleotide of any one of Embodiments 201-287, wherein the oligonucleotide comprises at least one nucleoside with a modified ribose sugar in addition to the nucleoside of Formula (II).

[1126] Embodiment 289: The oligonucleotide of any one of Embodiments 201-288, wherein the oligonucleotide comprises at least one nucleoside comprising a group other than H or OH at the 2′-position of the ribose sugar in addition to the nucleoside of Formula (II).

[1127] Embodiment 290: The oligonucleotide of any one of Embodiments 201-289, wherein the oligonucleotide comprises at least one nucleoside with a 2′-F ribose in addition to the nucleoside of Formula (II).

[1128] Embodiment 291: The oligonucleotide of any one of Embodiments 201-290, wherein the oligonucleotide comprises at least one nucleoside with a 2′-OMe ribose in addition to the nucleoside of Formula (II).

[1129] Embodiment 292: The oligonucleotide of any one of Embodiments 201-291, wherein the oligonucleotide comprises at least one nucleoside comprising a moiety other than a ribose sugar in addition to the nucleoside of Formula (II).

[1130] Embodiment 293: The oligonucleotide of any one of Embodiments 201-292, wherein the oligonucleotide comprises at least one modified internucleotide linkage.

[1131] Embodiment 294: The oligonucleotide of any one of Embodiments 201-293, wherein the internucleotide linkage to the subsequent nucleoside is a modified internucleotide linkage.

[1132] Embodiment 295: The oligonucleotide of Embodiment 294, wherein the modified internucleotide linkage is a phosphorothioate linkage.

[1133] Embodiment 296: The oligonucleotide of any one of Embodiments 201-295, wherein the oligonucleotide is attached to a solid support.

[1134] Embodiment 297: The oligonucleotide of any one of Embodiments 201-296, wherein oligonucleotide comprises at least one ligand.

[1135] Embodiment 298: The oligonucleotide of any one of Embodiments 201-297, wherein the oligonucleotide comprises at least one hydroxyl, phosphate or amino protecting group.

[1136] Embodiment 299: A double-stranded nucleic acid comprising a first oligonucleotide strand and a second oligonucleotide strand substantially complementary to the first strand, wherein the first or second strand is an oligonucleotide of any one of Embodiments 201-298.

[1137] Embodiment 300: The double-stranded nucleic acid of Embodiment 298, wherein one of the first stand and second strand is the oligonucleotide of any one of Embodiments 201-298 and the other strand comprises on its 5′-end a vinylphosphonate group (VP) group (e.g., *═CH—X^{P}, X^{P} is a phosphate group and * is C5′), C₃₋₆ cycloalkylphosphonate (e.g., cyclopropylphosphonate), monophosphate (HO)₂(O) P—O-5′), diphosphate (HO)₂(O) P—O—P(HO)(O)—O-5′), triphosphate ((HO)₂(O) P—O—(HO)(O) P—O—P(HO)(O)—O-5′); monothiophosphate (phosphorothioate, (HO)₂(S) P—O-5′), monodithiophosphate (phosphorodithioate; (HO)(HS)(S) P—O-5′), phosphorothiolate ((HO)₂(O) P—S-5′); alpha-thiotriphosphate; beta-thiotriphosphate; gamma-thiotriphosphate; phosphoramidates ((HO)₂(O) P—NH-5′, (HO)(NH₂)(O) P—O-5′), alkylphosphonates [(R^{P})(OH)(O) P—O-5′, R^{P} is optionally substituted C₁₋₃₀ alkyl, e.g., methyl, ethyl, isopropyl, or propyl)], alkyletherphosphonates [(R^{P1})(OH)(O) P—O-5′, R^{P1} is alkoxyalkyl, e.g., methoxymethyl (CH₂OMe) or ethoxymethyl], (HO)₂(X) P—O[—(CH₂)ₐ—O—P(X)(OH)—O]_{b}-5′ or (HO)₂(X) P—O[—(CH₂)ₐ—P(X)(OH)—O]_{b}-5′ or (HO)₂(X) P—[—(CH₂)ₐ—O—P(X)(OH)—O]_{b}-5′, or optionally substituted alkyl, and dialkyl terminal phosphates and phosphate mimics (e.g., HO[—(CH₂)ₐ—O—P(X)(OH)—O]_{b}-5′, H₂N[—(CH₂)ₐ—O—P(X)(OH)—O]_{b}-5′, H[—(CH₂)ₐ—O—P(X)(OH)—O]_{b}-5′, Me₂N[—(CH₂)ₐ—O—P(X)(OH)—O]_{b}-5′, HO[—(CH₂)ₐ—P(X)(OH)—O]_{b}-5′, H₂N[—(CH₂)ₐ—P(X)(OH)—O]_{b}-5′, H[—(CH₂)ₐ—P(X)(OH)—O]_{b}-5′, Me₂N[—(CH₂)ₐ—P(X)(OH)—O]_{b}-5′, wherein X is O or S; and a and b are each independently 1-10, optionally, the strand comprised a vinylphosphonate group, e.g., an E-vinylphosphonate group.

[1138] Embodiment 301: The double-stranded nucleic acid of Embodiment 299 or 300, wherein the first and second strand are independently 15 to 25 nucleotides in length.

[1139] Embodiment 302: The double-stranded nucleic acid any one of Embodiments 299-301, wherein double-stranded nucleic acid is capable of inducing RNA interference.

[1140] Embodiment 303: The double-stranded nucleic acid of Embodiment 302, wherein the double-stranded nucleic acid comprises an antisense strand and sense strand, and wherein the sense strand is the oligonucleotide of any one of Embodiments 201-298.

[1141] Embodiment 304: The double-stranded nucleic acid of Embodiment 303, wherein the antisense strand comprises at its 5′-end a vinylphosphonate group (VP) group (e.g., *═CH—X^{P}, X^{P} is a phosphate group and * is C5′), C₃₋₆ cycloalkylphosphonate (e.g., cyclopropylphosphonate), monophosphate ((HO)₂(O) P—O-5′), diphosphate ((HO)₂(O) P—O—P(HO)(O)—O-5′), triphosphate ((HO)₂(O) P—O—(HO)(O) P—O—P(HO)(O)—O-5′); monothiophosphate (phosphorothioate, (HO)2(S) P—O-5′), monodithiophosphate (phosphorodithioate; (HO)(HS)(S) P—O-5′), phosphorothiolate ((HO)₂(O) P—S-5′); alpha-thiotriphosphate; beta-thiotriphosphate; gamma-thiotriphosphate; phosphoramidates ((HO)₂(O) P—NH-5′, (HO)(NH₂)(O) P—O-5′), alkylphosphonates [(R^{P})(OH)(O) P—O-5′, R^{P} is optionally substituted C₁₋₃₀ alkyl, e.g., methyl, ethyl, isopropyl, or propyl)], alkyletherphosphonates [(R^{P1})(OH)(O) P—O-5′, R^{P1} is alkoxyalkyl, e.g., methoxymethyl (CH₂OMe) or ethoxymethyl], (HO)₂(X) P—O[—(CH₂)ₐ—O—P(X)(OH)—O]_{b}-5′ or (HO)₂(X) P—O[—(CH₂)ₐ—P(X)(OH)—O]_{b}-5′ or (HO)₂(X) P—[—(CH₂)ₐ—O—P(X)(OH)—O]_{b}-5′, or optionally substituted alkyl, and dialkyl terminal phosphates and phosphate mimics (e.g., HO[—(CH₂)ₐ—O—P(X)(OH)—O]_{b}-5′, H₂N[—(CH₂)ₐ—O—P(X)(OH)—O]_{b}-5′, H[—(CH₂)ₐ—O—P(X)(OH)—O]_{b}-5′, Me₂N[—(CH₂)ₐ—O—P(X)(OH)—O]_{b}-5′, HO[—(CH₂)ₐ-P(X)(OH)—O]_{b}-5′, H₂N[—(CH₂)ₐ—P(X)(OH)—O]_{α}-5′, H[—(CH₂)ₐ—P(X)(OH)—O]_{b}-5′, Me₂N[—(CH₂)ₐ—P(X)(OH)—O]_{b}-5′, wherein X is O or S; and a and b are each independently 1-10, optionally, the antisense strand comprises at its 5′-end a vinylphosphonate group, e.g., a Z-vinylphosphonate group.

[1142] Embodiment 305: The double-stranded nucleic acid of any one of Embodiments 299-304, wherein one or both strands have a 1-5 nucleotide overhang on its respective 5′-end or 3′-end.

[1143] Embodiment 306: The double-stranded nucleic acid of any one of Embodiments 299-305, wherein only one strand has a 2 nucleotide overhang on its 5′-end or 3′-end.

[1144] Embodiment 307: The double-stranded nucleic acid of any one of Embodiments 299-306, wherein only one strand has a 2 nucleotide overhand on its 3′-end.

[1145] Embodiment 308: A pharmaceutical composition comprising an oligonucleotide of any one of Embodiments 201-298 or dsRNA molecule of any one of Embodiments 1-110 or 299-307, alone or in combination with a pharmaceutically acceptable carrier or excipient.

[1146] Embodiment 309: A gene silencing kit containing an oligonucleotide of any one of Embodiments 201-298 or dsRNA molecule of any one of Embodiments 1-110 or 299-307.

[1147] Embodiment 310: A method for silencing a target gene in a cell, the method comprising a step of introducing into the cell:
[1148] (i) a double-stranded RNA according to any one of Embodiments 1-110 or 299-307, wherein the antisense strand comprises a nucleotide sequence substantially complementary to the target gene; or
[1149] (ii) an oligonucleotide according to any one of Embodiments 201-298, wherein the oligonucleotide comprises a nucleotide sequence substantially complementary to the target gene.

[1150] Embodiment 311: A method of reducing the expression of a target gene in a subject, comprising administering to the subject either:
[1151] a double-stranded RNA according to any one of Embodiments 1-110 or 299-307, wherein the antisense strand comprises a nucleotide sequence substantially complementary to the target gene; or
[1152] an oligonucleotide according to any one of Embodiments 201-298, wherein the oligonucleotide comprises a nucleotide sequence substantially complementary to a target gene.

[1153] Embodiment 312: The method of Embodiment 311, wherein said administering is subcutaneous or intravenous administration.

### Some Selected Definitions

[1154] For convenience, certain terms employed herein, in the specification, examples and appended claims are collected herein. Unless stated otherwise, or implicit from context, the following terms and phrases include the meanings provided below. Unless explicitly stated otherwise, or apparent from context, the terms and phrases below do not exclude the meaning that the term or phrase has acquired in the art to which it pertains. The definitions are provided to aid in describing particular embodiments, and are not intended to limit the claimed invention, because the scope of the invention is limited only by the claims. Further, unless otherwise required by context, singular terms shall include pluralities and plural terms shall include the singular.

[1155] Unless defined otherwise, all technical and scientific terms used herein have the same meaning as those commonly understood to one of ordinary skill in the art to which this invention pertains. Although any known methods, devices, and materials may be used in the practice or testing of the invention, the methods, devices, and materials in this regard are described herein. Definitions of common terms in immunology and molecular biology can be found in The Merck Manual of Diagnosis and Therapy, 20th Edition, published by Merck Sharp & Dohme Corp., 2018 (ISBN 0911910190, 978-0911910421); Robert S. Porter et al. (eds.), The Encyclopedia of Molecular Cell Biology and Molecular Medicine, published by Blackwell Science Ltd., 1999-2012 (ISBN 9783527600908); and Robert A. Meyers (ed.), Molecular Biology and Biotechnology: a Comprehensive Desk Reference, published by VCH Publishers, Inc., 1995 (ISBN 1-56081-569-8); Immunology by Werner Luttmann, published by Elsevier, 2006; Janeway's Immunobiology, Kenneth Murphy, Allan Mowat, Casey Weaver (eds.), W. W. Norton & Company, 2016 (ISBN 0815345054, 978-0815345053); Lewin's Genes XI, published by Jones & Bartlett Publishers, 2014 (ISBN-1449659055); Michael Richard Green and Joseph Sambrook, Molecular Cloning: A Laboratory Manual, 4th ed., Cold Spring Harbor Laboratory Press, Cold Spring Harbor, N.Y., USA (2012) (ISBN 1936113414); Davis et al., Basic Methods in Molecular Biology, Elsevier Science Publishing, Inc., New York, USA (2012) (ISBN 044460149X); Laboratory Methods in Enzymology: DNA, Jon Lorsch (ed.) Elsevier, 2013 (ISBN 0124199542); Current Protocols in Molecular Biology (CPMB), Frederick M. Ausubel (ed.), John Wiley and Sons, 2014 (ISBN 047150338X, 9780471503385), Current Protocols in Protein Science (CPPS), John E. Coligan (ed.), John Wiley and Sons, Inc., 2005; and Current Protocols in Immunology (CPI) (John E. Coligan, ADA M Kruisbeek, David H Margulies, Ethan M Shevach, Warren Strobe, (eds.) John Wiley and Sons, Inc., 2003 (ISBN 0471142735, 9780471142737), the contents of which are all incorporated by reference herein in their entireties.

[1156] Further, the practice of the present invention can employ, unless otherwise indicated, conventional techniques of molecular biology (including recombinant techniques), microbiology, cell biology, biochemistry, and immunology, which are within the skill of the art. Such techniques are explained fully in the literature, such as, “Molecular Cloning: A Laboratory Manual”, second edition (Sambrook et al., 1989); “Oligonucleotide Synthesis” (M. J. Gait, ed., 1984); “Animal Cell Culture” (R. I. Freshney, ed., 1987); “Methods in Enzymology” (Academic Press, Inc.); “Current Protocols in Molecular Biology” (F. M. Ausubel et al., eds., 1987, and periodic updates); “PCR: The Polymerase Chain Reaction”, (Mullis et al., ed., 1994); “A Practical Guide to Molecular Cloning” (Perbal Bernard V., 1988); “Phage Display: A Laboratory Manual” (Barbas et al., 2001).

[1157] Where a range of values is provided, it is understood that each intervening value, to the tenth of the unit of the lower limit unless the context clearly dictates otherwise, between the upper and lower limit of that range and any other stated or intervening value in that stated range, is encompassed within the invention. The upper and lower limits of these smaller ranges may independently be included in the smaller ranges and are also encompassed within the invention, subject to any specifically excluded limit in the stated range. Where the stated range includes one or both of the limits, ranges excluding either or both of those included limits are also included in the invention.

[1158] Other than in the operating examples, or where otherwise indicated, all numbers expressing quantities of ingredients or reaction conditions used herein should be understood as modified in all instances by the term “about.” The term “about” when used in connection with percentages can mean±1%. In some embodiments of the various aspects described herein, the term “about” when used in connection with percentages can mean±5%. The term “about” is used herein to provide literal support for the exact number that it precedes, as well as a number that is near to or approximately the number that the term precedes. In determining whether a number is near to or approximately a specifically recited number, the near or approximating unrecited number may be a number which, in the context in which it is presented, provides the substantial equivalent of the specifically recited number.

[1159] As used herein the term “comprising” or “comprises” is used in reference to compositions, methods, and respective component(s) thereof, that are essential to the invention, yet open to the inclusion of unspecified elements, whether essential or not.

[1160] The term “consisting of” refers to compositions, methods, and respective components thereof as described herein, which are exclusive of any element not recited in that description of the embodiment.

[1161] As used herein the term “consisting essentially of” refers to those elements required for a given embodiment. The term permits the presence of additional elements that do not materially affect the basic and novel or functional characteristic(s) of that embodiment of the invention.

[1162] The singular terms “a,” “an,” and “the” include plural referents unless context clearly indicates otherwise. Similarly, the word “or” is intended to include “and” unless the context clearly indicates otherwise. It is further noted that the claims can be drafted to exclude any optional element. As such, this statement is intended to serve as antecedent basis for use of such exclusive terminology as “solely,” “only” and the like in connection with the recitation of claim elements, or use of a “negative” limitation.

[1163] The abbreviation, “e.g.” is derived from the Latin exempli gratia, and is used herein to indicate a non-limiting example. Thus, the abbreviation “e.g.” is synonymous with the term “for example.”

[1164] As used herein, the terms “siRNA”, and “iRNA agent” are used interchangeably to refer to agents that can mediate silencing of a target RNA, e.g., mRNA, e.g., a transcript of a gene that encodes a protein. For convenience, such mRNA is also referred to herein as mRNA to be silenced. Such a gene is also referred to as a target gene. In general, the RNA to be silenced is an endogenous gene, exogenous gene or a pathogen gene. In addition, RNAs other than mRNA, e.g., tRNAs, and viral RNAs, can also be targeted.

[1165] As used herein, the phrase “mediates RNAi” refers to the ability to silence, in a sequence specific manner, a target gene, e.g., mRNA. While not wishing to be bound by theory, it is believed that silencing uses the RNAi machinery or process and a guide RNA, e.g., antisense strand of a dsRNA, where the antisense strand is 21 to 23 nucleotides in length.

[1166] By “specifically hybridizable” and “complementary” is meant that a nucleic acid can form hydrogen bond(s) with another nucleic acid sequence by either traditional Watson-Crick or other non-traditional types. In reference to the nucleic molecules of the present invention, the binding free energy for a nucleic acid molecule with its complementary sequence is sufficient to allow the relevant function of the nucleic acid to proceed, e.g., RNAi activity. Determination of binding free energies for nucleic acid molecules is well known in the art (see, e.g., Turner et al, 1987, CSH Symp. Quant. Biol. LII pp. 123-133; Frier et al., 1986, Proc. Nat. Acad. Sci. USA 83:9373-9377; Turner et al., 1987,/. Am. Chem. Soc. 109:3783-3785). A percent complementarity indicates the percentage of contiguous residues in a nucleic acid molecule that can form hydrogen bonds (e.g., Watson-Crick base pairing) with a second nucleic acid sequence (e.g., 5, 6, 7, 8, 9,10 out of 10 being 50%, 60%, 70%, 80%, 90%, and 100% complementary). “Perfectly complementary” or 100% complementarity means that all the contiguous residues of a nucleic acid sequence will hydrogen bond with the same number of contiguous residues in a second nucleic acid sequence. Less than perfect complementarity refers to the situation in which some, but not all, nucleoside units of two strands can hydrogen bond with each other. “Substantial complementarity” refers to polynucleotide strands exhibiting 90% or greater complementarity, excluding regions of the polynucleotide strands, such as overhangs, that are selected so as to be noncomplementary. Specific binding requires a sufficient degree of complementarity to avoid non-specific binding of the oligomeric compound to non-target sequences under conditions in which specific binding is desired, i.e., under physiological conditions in the case of in vivo assays or therapeutic treatment, or in the case of in vitro assays, under conditions in which the assays are performed. The non-target sequences typically differ by at least 5 nucleotides.

[1167] The term “off-target” and the phrase “off-target effects” refer to any instance in which an effector molecule against a given target causes an unintended affect by interacting either directly or indirectly with another target sequence, a DNA sequence or a cellular protein or other moiety. For example, an “off-target effect” may occur when there is a simultaneous degradation of other transcripts due to partial homology or complementarity between that other transcript and the sense and/or antisense strand of an siRNA.

[1168] The terms “decrease”, “reduced”, “reduction”, or “inhibit” are all used herein to mean a decrease by a statistically significant amount. In some embodiments, “reduce,” “reduction” or “decrease” or “inhibit” typically means a decrease by at least 10% as compared to a reference level (e.g. the absence of a given treatment or agent) and can include, for example, a decrease by at least about 10%, at least about 20%, at least about 25%, at least about 30%, at least about 35%, at least about 40%, at least about 45%, at least about 50%, at least about 55%, at least about 60%, at least about 65%, at least about 70%, at least about 75%, at least about 80%, at least about 85%, at least about 90%, at least about 95%, at least about 98%, at least about 99%, or more. As used herein, “reduction” or “inhibition” does not encompass a complete inhibition or reduction as compared to a reference level. “Complete inhibition” is a 100% inhibition as compared to a reference level. A decrease can be preferably down to a level accepted as within the range of normal for an individual without a given disorder.

[1169] The terms “increased”, “increase”, “enhance”, or “activate” are all used herein to mean an increase by a statically significant amount. In some embodiments, the terms “increased”, “increase”, “enhance”, or “activate” can mean an increase of at least 10% as compared to a reference level, for example an increase of at least about 20%, or at least about 30%, or at least about 40%, or at least about 50%, or at least about 60%, or at least about 70%, or at least about 80%, or at least about 90% or up to and including a 100% increase or any increase between 10-100% as compared to a reference level, or at least about a 2-fold, or at least about a 3-fold, or at least about a 4-fold, or at least about a 5-fold or at least about a 10-fold increase, or any increase between 2-fold and 10-fold or greater as compared to a reference level. In the context of a marker or symptom, a “increase” is a statistically significant increase in such level.

[1170] As used herein, a “terminal region” of a strand refers to positions 1-4, e.g., positions 1, 2, 3, and 4, counting from the nearest end of the strand. For example, a 5′-terminal region refers to positions 1-4, e.g., positions 1, 2, 3 and 4 counting from the 5′-end of the strand. Similarly, a 3′-terminal region refers to positions 1-4, e.g., positions 1, 2, 3 and 4 counting from the 3′-end of the strand.

[1171] For example, a 5′-terminal region for the antisense strand is positions 1, 2, 3 and 4 counting from the 5′-end of the antisense strand. A preferred 5′-terminal region for the antisense strand is positions 1, 2 and 3 counting from the 5′-end of the antisense strand. A 3′-terminal region for the antisense strand can be positions 1, 2, 3, and 4 counting from the 3′-end of the strand. A preferred 3′-terminal region for the antisense strand is positions 1, 2 and 3 counting from the 3′-end of the antisense strand.

[1172] Similarly, a 5′-terminal region for the sense strand is positions 1, 2, 3 and 4 counting from the 5′-end of the sense strand. A preferred 5′-terminal region for the sense strand is positions 1, 2 and 3 counting from the 5′-end of the sense strand. A 3′-terminal region for the sense strand can be positions 1, 2, 3, and 4 counting from the 3′-end of the strand. A preferred 3′-terminal region for the sense strand is positions 1, 2 and 3 counting from the 3′-end of the sense strand.

[1173] As used herein, a “central region” of a strand refers to positions 5-17, e.g., positions 6-16, positions 6-15, positions 6-14, positions 6-13, positions 6-12, positions 7-15, positions 7-14, positions 7-13, positions, 7-12, positions 8-16, positions 8-15, positions 8-14, positions 8-13, positions 8-12, positions 9-16, positions 9-15, positions 9-14, positions 9-13, positions 9-12, positions 10-16, positions 10-15, positions 10-14, positions 10-13 or positions 10-12, counting from the 5′-end of the strand. For example, the central region of a strand means positions 5, 6, 7, 8, 9, 10, 11, 12, 13, 14, 15, 16 or 17 of the strand. A preferred central region for the sense strand is positions 6, 7, 8, 9, 10, 11, 12, 13, and 14, counting from the 5′-end of the sense strand. A more preferred central region for the sense strand is positions 7, 8, 9, 10, 11, 12 and 13, counting from the 5′-end of the sense strand. A preferred central region for the antisense strand is positions 9, 10, 11, 12, 13, 14, 15 16 and 17, counting from 5′-end of the antisense strand. A more preferred central region for the antisense strand is positions 10, 11, 12, 13, 14, 15 and 16, counting from 5′-end of the antisense strand.

[1174] As used herein, the term “in vitro” refers to events that occur in an artificial environment, e.g., in a test tube or reaction vessel, in cell culture, etc., rather than within an organism (e.g. animal or a plant). As used herein, the term “ex vivo” refers to cells which are removed from a living organism and cultured outside the organism (e.g., in a test tube). As used herein, the term “in vivo” refers to events that occur within an organism (e.g. animal, plant, and/or microbe).

[1175] As used herein, the term “subject” or “patient” refers to any organism to which a composition disclosed herein can be administered, e.g., for experimental, diagnostic, and/or therapeutic purposes. Typical subjects include animals (e.g., mammals such as mice, rats, rabbits, non-human primates, and humans) and/or plants. Usually the animal is a vertebrate such as a primate, rodent, domestic animal or game animal. Primates include chimpanzees, cynomologous monkeys, spider monkeys, and macaques, e.g., Rhesus. Rodents include mice, rats, woodchucks, ferrets, rabbits and hamsters. Domestic and game animals include cows, horses, pigs, deer, bison, buffalo, feline species, e.g., domestic cat, canine species, e.g., dog, fox, wolf, avian species, e.g., chicken, emu, ostrich, and fish, e.g., trout, catfish and salmon. Patient or subject includes any subset of the foregoing, e.g., all of the above, but excluding one or more groups or species such as humans, primates or rodents. In certain embodiments of the aspects described herein, the subject is a mammal, e.g., a primate, e.g., a human. The terms, “patient” and “subject” are used interchangeably herein. A subject can be male or female.

[1176] Preferably, the subject is a mammal. The mammal can be a human, non-human primate, mouse, rat, dog, cat, horse, or cow, but are not limited to these examples. Mammals other than humans can be advantageously used as subjects that represent animal models of human diseases and disorders. In addition, compounds, compositions and methods described herein can be used to with domesticated animals and/or pets.

[1177] A subject can be one who has been previously diagnosed with or identified as suffering from or having a condition in need of treatment. Alternatively, a subject can also be one who has not been previously diagnosed. A “subject in need” of testing for a particular condition can be a subject having that condition, diagnosed as having that condition, or at risk of developing that condition.

[1178] In some embodiments, the subject is human. In another embodiment, the subject is an experimental animal or animal substitute as a disease model. The term does not denote a particular age or sex. Thus, adult and newborn subjects, as well as fetuses, whether male or female, are intended to be covered. Examples of subjects include humans, dogs, cats, cows, goats, and mice. The term subject is further intended to include transgenic species. In some embodiments, the subject can be of European ancestry. In some embodiments, the subject can be of African American ancestry. In some embodiments, the subject can be of Asian ancestry.

[1179] In jurisdictions that forbid the patenting of methods that are practiced on the human body, the meaning of “administering” of a composition to a human subject shall be restricted to prescribing a controlled substance that a human subject will self-administer by any technique (e.g., orally, inhalation, topical application, injection, insertion, etc.). The broadest reasonable interpretation that is consistent with laws or regulations defining patentable subject matter is intended. In jurisdictions that do not forbid the patenting of methods that are practiced on the human body, the “administering” of compositions includes both methods practiced on the human body and also the foregoing activities.

[1180] As used herein, the term “parenteral administration,” refers to administration through injection or infusion. Parenteral administration includes, but is not limited to, subcutaneous administration, intravenous administration, or intramuscular administration.

[1181] As used herein, the term “subcutaneous administration” refers to administration just below the skin. “Intravenous administration” means administration into a vein.

[1182] As used herein, the term “dose” refers to a specified quantity of a pharmaceutical agent provided in a single administration. In certain embodiments, a dose may be administered in two or more boluses, tablets, or injections. For example, in certain embodiments, where subcutaneous administration is desired, the desired dose requires a volume not easily accommodated by a single injection. In such embodiments, two or more injections may be used to achieve the desired dose. In certain embodiments, a dose may be administered in two or more injections to minimize injection site reaction in an individual.

[1183] As used herein, the term “dosage unit” refers to a form in which a pharmaceutical agent is provided. In certain embodiments, a dosage unit is a vial comprising lyophilized antisense oligonucleotide. In certain embodiments, a dosage unit is a vial comprising reconstituted antisense oligonucleotide.

[1184] By the terms “treat,” “treating” or “treatment of” (and grammatical variations thereof) it is meant that the severity of the subject's condition is reduced, at least partially improved or stabilized and/or that some alleviation, mitigation, decrease or stabilization in at least one clinical symptom is achieved and/or there is a delay in the progression of the disease or disorder.

[1185] The terms “prevent,” “preventing” and “prevention” (and grammatical variations thereof) refer to prevention and/or delay of the onset of a disease, disorder and/or a clinical symptom(s) in a subject and/or a reduction in the severity of the onset of the disease, disorder and/or clinical symptom(s) relative to what would occur in the absence of the methods of the invention. The prevention can be complete, e.g., the total absence of the disease, disorder and/or clinical symptom(s). The prevention can also be partial, such that the occurrence of the disease, disorder and/or clinical symptom(s) in the subject and/or the severity of onset is less than what would occur in the absence of the present invention.

[1186] The term “statistically significant” or “significantly” refers to statistical significance and generally means a two standard deviation (2SD) or greater difference.

[1187] As used herein, the term “aliphatic” means a saturated or unsaturated and straight, branched, and/or cyclic hydrocarbon having the defined number of carbon atom. Examples include alkyl, alkenyl, alkynyl, cycloalkyl, cycloalkylalkyl, cycloalkylalkenyl, and cycloalkylalkynyl, having the defined number of carbon atoms.

[1188] As used herein, the term “alkyl” refers to an aliphatic hydrocarbon group which can be straight or branched having 1 to about 60 carbon atoms in the chain, and which preferably have about 6 to about 50 carbons in the chain. “Lower alkyl” refers to an alkyl group having 1 to about 8 carbon atoms. “Higher alkyl” refers to an alkyl group having about 10 to about 20 carbon atoms. The alkyl group can be optionally substituted with one or more alkyl group substituents which can be the same or different, where “alkyl group substituent” includes halo, amino, aryl, hydroxyl, alkoxy, aryloxy, alkyloxy, alkylthio, arylthio, aralkyloxy, aralkylthio, carboxy, alkoxycarbonyl, oxo and cycloalkyl. “Branched” refers to an alkyl group in which a lower alkyl group, such as methyl, ethyl or propyl, is attached to a linear alkyl chain. Exemplary alkyl groups include methyl, ethyl, propyl, i-propyl, n-butyl, t-butyl, n-pentyl, hexyl, heptyl, octyl, decyl, dodecyl, tridecyl, tetradecyl, pentadecyl and hexadecyl. Useful alkyl groups include branched or straight chain alkyl groups of 6 to 50 carbon, and also include the lower alkyl groups of 1 to about 4 carbons and the higher alkyl groups of about 12 to about 16 carbons.

[1189] A “heteroalkyl” group substitutes any one of the carbons of the alkyl group with a heteroatom having the appropriate number of hydrogen atoms attached (e.g., a CH₂ group to an NH group or an O group). The term “heteroalkyl” include optionally substituted alkyl, alkenyl and alkynyl radicals which have one or more skeletal chain atoms selected from an atom other than carbon, e.g., oxygen, nitrogen, sulfur, phosphorus, silicon, or combinations thereof. In certain embodiments, the heteroatom(s) is placed at any interior position of the heteroalkyl group. Examples include, but are not limited to, —CH₂—O—CH₃, —CH₂—CH₂—O—CH₃, —CH₂—NH—CH₃, —CH₂—CH₂—NH—CH₃, —CH₂—N(CH₃)—CH₃, —CH₂—CH₂—NH—CH₃, —CH₂—CH₂—N(CH₃)—CH₃, —CH₂—S—CH₂—CH₃, —CH₂—CH₂, —S(O)—CH₃, —CH₂—CH₂—S(O)₂—CH₃, —CH═CH—O—CH₃, —Si(CH₃)₃, —CH₂—CH═N—OCH₃, and —CH═CH—N(CH₃)—CH₃. In some embodiments, up to two heteroatoms are consecutive, such as, by way of example, —CH₂—NH—OCH₃ and —CH₂—O—Si(CH₃)₃

[1190] As used herein, the term “alkenyl” refers to an alkyl group containing at least one carbon-carbon double bond. The alkenyl group can be optionally substituted with one or more “alkyl group substituents.” Exemplary alkenyl groups include vinyl, allyl, n-pentenyl, decenyl, dodecenyl, tetradecadienyl, heptadec-8-en-1-yl and heptadec-8,11-dien-1-yl.

[1191] As used herein, the term “alkynyl” refers to an alkyl group containing a carbon-carbon triple bond. The alkynyl group can be optionally substituted with one or more “alkyl group substituents.” Exemplary alkynyl groups include ethynyl, propargyl, n-pentynyl, decynyl and dodecynyl. Useful alkynyl groups include the lower alkynyl groups.

[1192] As used herein, the term “cycloalkyl” refers to a non-aromatic mono- or multicyclic ring system of about 3 to about 12 carbon atoms. The cycloalkyl group can be optionally partially unsaturated. The cycloalkyl group can be also optionally substituted with an aryl group substituent, oxo and/or alkylene. Representative monocyclic cycloalkyl rings include cyclopentyl, cyclohexyl and cycloheptyl. Useful multicyclic cycloalkyl rings include adamantyl, octahydronaphthyl, decalin, camphor, camphane, and noradamantyl.

[1193] “Heterocyclyl” refers to a nonaromatic 3-8 membered monocyclic, 8-12 membered bicyclic, or 11-14 membered tricyclic ring system having 1-3 heteroatoms if monocyclic, 1-6 heteroatoms if bicyclic, or 1-9 heteroatoms if tricyclic, said heteroatoms selected from O, N, or S (e.g., carbon atoms and 1-3, 1-6, or 1-9 heteroatoms of N, O, or S if monocyclic, bicyclic, or tricyclic, respectively). Cₓheterocyclyl and Cₓ-C_{y}heterocyclyl are typically used where X and Y indicate the number of carbon atoms in the ring system. In some embodiments, 1, 2 or 3 hydrogen atoms of each ring can be substituted by a substituent. Exemplary heterocyclyl groups include, but are not limited to piperazinyl, pyrrolidinyl, dioxanyl, morpholinyl, tetrahydrofuranyl, piperidyl, 4-morpholyl, 4-piperazinyl, pyrrolidinyl, perhydropyrrolizinyl, 1,4-diazaperhydroepinyl, 1,3-dioxanyl, 1,4-dioxanyland the like.

[1194] “Aryl” refers to an aromatic carbocyclic radical containing about 3 to about 13 carbon atoms. The aryl group can be optionally substituted with one or more aryl group substituents, which can be the same or different, where “aryl group substituent” includes alkyl, alkenyl, alkynyl, aryl, aralkyl, hydroxyl, alkoxy, aryloxy, aralkoxy, carboxy, aroyl, halo, nitro, trihalomethyl, cyano, alkoxycarbonyl, aryloxycarbonyl, aralkoxycarbonyl, acyloxy, acylamino, aroylamino, carbamoyl, alkylcarbamoyl, dialkylcarbamoyl, rylthio, alkylthio, alkylene and —NRR′, where R and R′ are each independently hydrogen, alkyl, aryl and aralkyl. Exemplary aryl groups include substituted or unsubstituted phenyl and substituted or unsubstituted naphthyl.

[1195] “Heteroaryl” refers to an aromatic 3-8 membered monocyclic, 8-12 membered fused bicyclic, or 11-14 membered fused tricyclic ring system having 1-3 heteroatoms if monocyclic, 1-6 heteroatoms if bicyclic, or 1-9 heteroatoms if tricyclic, said heteroatoms selected from O, N, or S (e.g., carbon atoms and 1-3, 1-6, or 1-9 heteroatoms of N, O, or S if monocyclic, bicyclic, or tricyclic, respectively.

[1196] Exemplary aryl and heteroaryls include, but are not limited to, phenyl, pyridinyl, pyrimidinyl, furanyl, thienyl, imidazolyl, thiazolyl, pyrazolyl, pyridazinyl, pyrazinyl, triazinyl, tetrazolyl, indolyl, benzyl, naphthyl, anthracenyl, azulenyl, fluorenyl, indanyl, indenyl, naphthyl, tetrahydronaphthyl, benzimidazolyl, benzofuranyl, benzothiofuranyl, benzothiophenyl, benzoxazolyl, benzoxazolinyl, benzthiazolyl, benztriazolyl, benztetrazolyl, benzisoxazolyl, benzisothiazolyl, benzimidazolinyl, carbazolyl, 4aH carbazolyl, carbolinyl, chromanyl, chromenyl, cinnolinyl, decahydroquinolinyl, 2H,6H-1,5,2-dithiazinyl, dihydrofuro[2,3 b]tetrahydrofuran, furanyl, furazanyl, imidazolidinyl, imidazolinyl, imidazolyl, 1H-indazolyl, indolenyl, indolinyl, indolizinyl, indolyl, 3H-indolyl, isatinoyl, isobenzofuranyl, isochromanyl, isoindazolyl, isoindolinyl, isoindolyl, isoquinolinyl, isothiazolyl, isoxazolyl, methylenedioxyphenyl, morpholinyl, naphthyridinyl, octahydroisoquinolinyl, oxadiazolyl, 1,2,3-oxadiazolyl, 1,2,4-oxadiazolyl, 1,2,5-oxadiazolyl, 1,3,4-oxadiazolyl, oxazolidinyl, oxazolyl, oxindolyl, pyrimidinyl, phenanthridinyl, phenanthrolinyl, phenazinyl, phenothiazinyl, phenoxathinyl, phenoxazinyl, phthalazinyl, piperazinyl, piperidinyl, piperidonyl, 4-piperidonyl, piperonyl, pteridinyl, purinyl, pyranyl, pyrazinyl, pyrazolidinyl, pyrazolinyl, pyrazolyl, pyridazinyl, pyridooxazole, pyridoimidazole, pyridothiazole, pyridinyl, pyridyl, pyrimidinyl, pyrrolidinyl, pyrrolinyl, 2H-pyrrolyl, pyrrolyl, quinazolinyl, quinolinyl, 4H-quinolizinyl, quinoxalinyl, quinuclidinyl, tetrahydrofuranyl, tetrahydroisoquinolinyl, tetrahydroquinolinyl, tetrazolyl, 6H-1,2,5-thiadiazinyl, 1,2,3-thiadiazolyl, 1,2,4-thiadiazolyl, 1,2,5-thiadiazolyl, 1,3,4-thiadiazolyl, thianthrenyl, thiazolyl, thienyl, thienothiazolyl, thienooxazolyl, thienoimidazolyl, thiophenyl and xanthenyl, and the like. In some embodiments, 1, 2, 3, or 4 hydrogen atoms of each ring can be substituted by a substituent.

[1197] As used herein, the term “halogen” or “halo” refers to an atom selected from fluorine, chlorine, bromine and iodine. The term “halogen radioisotope” or “halo isotope” refers to a radionuclide of an atom selected from fluorine, chlorine, bromine and iodine.

[1198] A “halogen-substituted moiety” or “halo-substituted moiety”, as an isolated group or part of a larger group, means an aliphatic, alicyclic, or aromatic moiety, as described herein, substituted by one or more “halo” atoms, as such terms are defined in this application.

[1199] The term “haloalkyl” as used herein refers to alkyl and alkoxy structures structure with at least one substituent of fluorine, chorine, bromine or iodine, or with combinations thereof. In embodiments, where more than one halogen is included in the group, the halogens are the same or they are different. The terms “fluoroalkyl” and “fluoroalkoxy” include haloalkyl and haloalkoxy groups, respectively, in which the halo is fluorine. Exemplary halo-substituted alkyl includes haloalkyl, dihaloalkyl, trihaloalkyl, perhaloalkyl and the like (e.g. halosubstituted (C₁-C₃)alkyl includes chloromethyl, dichloromethyl, difluoromethyl, trifluoromethyl (CF₃), perfluoroethyl, 2,2,2-trifluoroethyl, 2,2,2-trifluoro-1,1-dichloroethyl, and the like).

[1200] As used herein, the term “amino” means —NH₂. The term “alkylamino” means a nitrogen moiety having one straight or branched unsaturated aliphatic, cyclyl, or heterocyclyl radicals attached to the nitrogen, e.g., —NH (alkyl). The term “dialkylamino” means a nitrogen moiety having at two straight or branched unsaturated aliphatic, cyclyl, or heterocyclyl radicals attached to the nitrogen, e.g., —N(alkyl) (alkyl). The term “alkylamino” includes “alkenylamino,” “alkynylamino,” “cyclylamino,” and “heterocyclylamino.” The term “arylamino” means a nitrogen moiety having at least one aryl radical attached to the nitrogen. For example, —NHaryl, and —N(aryl)₂. The term “heteroarylamino” means a nitrogen moiety having at least one heteroaryl radical attached to the nitrogen. For example —NHheteroaryl, and —N(heteroaryl)₂. Optionally, two substituents together with the nitrogen can also form a ring. Unless indicated otherwise, the compounds described herein containing amino moieties can include protected derivatives thereof. Suitable protecting groups for amino moieties include acetyl, tertbutoxycarbonyl, benzyloxycarbonyl, and the like. Exemplary alkylamino includes, but is not limited to, NH(C₁-C₁₀alkyl), such as —NHCH₃, —NHCH₂CH₃, —NHCH₂CH₂CH₃, and —NHCH(CH₃)₂.

[1201] Exemplary dialkylamino includes, but is not limited to, —N(C₁-C₁₀alkyl)₂, such as N(CH₃)₂, —N(CH₂CH₃)₂, —N(CH₂CH₂CH₃)₂, and —N(CH(CH₃)₂)₂.

[1202] The term “aminoalkyl” means an alkyl, alkenyl, and alkynyl as defined above, except where one or more substituted or unsubstituted nitrogen atoms (—N—) are positioned between carbon atoms of the alkyl, alkenyl, or alkynyl. For example, an (C₂-C₆)aminoalkyl refers to a chain comprising between 2 and 6 carbons and one or more nitrogen atoms positioned between the carbon atoms.

[1203] The terms “hydroxyl” and “hydroxyl” mean the radical —OH.

[1204] The terms “alkoxyl” or “alkoxy” as used herein refers to an alkyl group, as defined above, having an oxygen radical attached thereto, and can be represented by one of —O-alkyl, —O-alkenyl, and —O-alkynyl. Aroxy can be represented by —O-aryl or O-heteroaryl, wherein aryl and heteroaryl are as defined herein. The alkoxy and aroxy groups can be substituted as described above for alkyl. Exemplary alkoxy groups include, but are not limited to O-methyl, O-ethyl, O-n-propyl, O-isopropyl, O-n-butyl, O-isobutyl, O-sec-butyl, O-tert-butyl, O-pentyl, O-hexyl, O-cyclopropyl, O-cyclobutyl, O-cyclopentyl, O-cyclohexyl and the like.

[1205] As used herein, the term “carbonyl” means the radical —C(O)—. It is noted that the carbonyl radical can be further substituted with a variety of substituents to form different carbonyl groups including acids, acid halides, amides, esters, ketones, and the like.

[1206] As used herein, the term “oxo” means double bonded oxygen, i.e., ═O.

[1207] The term “carboxy” means the radical —C(O)O—. It is noted that compounds described herein containing carboxy moieties can include protected derivatives thereof, i.e., where the oxygen is substituted with a protecting group. Suitable protecting groups for carboxy moieties include benzyl, tert-butyl, and the like. As used herein, a carboxy group includes-COOH, i.e., carboxyl group.

[1208] The term “ester” refers to a chemical moiety with formula —C(═O)OR, where R is selected from the group consisting of alkyl, cycloalkyl, aryl, heteroaryl and heterocycloalkyl.

[1209] The term “cyano” means the radical —CN.

[1210] The term “nitro” means the radical —NO₂.

[1211] The term, “heteroatom” refers to an atom that is not a carbon atom. Particular examples of heteroatoms include, but are not limited to nitrogen, oxygen, sulfur and halogens. A “heteroatom moiety” includes a moiety where the atom by which the moiety is attached is not a carbon. Examples of heteroatom moieties include —N═, —NR^{N}—, —N⁺(O^{-)═, —O—, —S— or —S(O)}₂—, —OS(O)₂—, and —SS—, wherein RN is H or a further substituent.

[1212] The terms “alkylthio” and “thioalkoxy” refer to an alkoxy group, as defined above, where the oxygen atom is replaced with a sulfur. In preferred embodiments, the “alkylthio” moiety is represented by one of —S-alkyl, —S-alkenyl, and —S-alkynyl. Representative alkylthio groups include methylthio, ethylthio, and the like. The term “alkylthio” also encompasses cycloalkyl groups, alkene and cycloalkene groups, and alkyne groups. “Arylthio” refers to aryl or heteroaryl groups.

[1213] The term “sulfinyl” means the radical —SO—. It is noted that the sulfinyl radical can be further substituted with a variety of substituents to form different sulfinyl groups including sulfinic acids, sulfinamides, sulfinyl esters, sulfoxides, and the like.

[1214] The term “sulfonyl” means the radical —SO₂—. It is noted that the sulfonyl radical can be further substituted with a variety of substituents to form different sulfonyl groups including sulfonic acids (—SO₃H), sulfonamides, sulfonate esters, sulfones, and the like.

[1215] The term “thiocarbonyl” means the radical —C(S)—. It is noted that the thiocarbonyl radical can be further substituted with a variety of substituents to form different thiocarbonyl groups including thioacids, thioamides, thioesters, thioketones, and the like.

[1216] “Acyl” refers to an alkyl-CO— group, wherein alkyl is as previously described. Exemplary acyl groups comprise alkyl of 1 to about 30 carbon atoms. Exemplary acyl groups also include acetyl, propanoyl, 2-methylpropanoyl, butanoyl and palmitoyl.

[1217] “Aroyl” means an aryl-CO— group, wherein aryl is as previously described. Exemplary aroyl groups include benzoyl and 1- and 2-naphthoyl.

[1218] “Arylthio” refers to an aryl-S— group, wherein the aryl group is as previously described. Exemplary arylthio groups include phenylthio and naphthylthio.

[1219] “Aralkyl” refers to an aryl-alkyl- group, wherein aryl and alkyl are as previously described. Exemplary aralkyl groups include benzyl, phenylethyl and naphthylmethyl.

[1220] “Aralkyloxy” refers to an aralkyl-O— group, wherein the aralkyl group is as previously described. An exemplary aralkyloxy group is benzyloxy.

[1221] “Aralkylthio” refers to an aralkyl-S— group, wherein the aralkyl group is as previously described. An exemplary aralkylthio group is benzylthio.

[1222] “Alkoxycarbonyl” refers to an alkyl-O—CO— group. Exemplary alkoxycarbonyl groups include methoxycarbonyl, ethoxycarbonyl, butyloxycarbonyl, and t-butyloxycarbonyl.

[1223] “Aryloxycarbonyl” refers to an aryl-O—CO— group. Exemplary aryloxycarbonyl groups include phenoxy- and naphthoxy-carbonyl.

[1224] “Aralkoxycarbonyl” refers to an aralkyl-O—CO— group. An exemplary aralkoxycarbonyl group is benzyloxycarbonyl.

[1225] “Carbamoyl” refers to an H₂N—CO— group.

[1226] “Alkylcarbamoyl” refers to a R′RN—CO— group, wherein one of R and R′ is hydrogen and the other of R and R′ is alkyl as previously described.

[1227] “Dialkylcarbamoyl” refers to R′RN—CO— group, wherein each of R and R′ is independently alkyl as previously described.

[1228] “Acyloxy” refers to an acyl-O— group, wherein acyl is as previously described. “Acylamino” refers to an acyl-NH— group, wherein acyl is as previously described. “Aroylamino” refers to an aroyl-NH— group, wherein aroyl is as previously described.

[1229] The term “optionally substituted” means that the specified group or moiety is unsubstituted or is substituted with one or more (typically 1, 2, 3, 4, 5 or 6 substituents) independently selected from the group of substituents listed below in the definition for “substituents” or otherwise specified. The term “substituents” refers to a group “substituted” on a substituted group at any atom of the substituted group. Suitable substituents include, without limitation, halogen, hydroxyl, caboxy, oxo, nitro, haloalkyl, alkyl, alkenyl, alkynyl, alkaryl, aryl, heteroaryl, cyclyl, heterocyclyl, aralkyl, alkoxy, aryloxy, amino, acylamino, alkylcarbanoyl, arylcarbanoyl, aminoalkyl, alkoxycarbonyl, carboxy, hydroxylalkyl, alkanesulfonyl, arenesulfonyl, alkanesulfonamido, arenesulfonamido, aralkylsulfonamido, alkylcarbonyl, acyloxy, cyano or ureido. In some cases, two substituents, together with the carbons to which they are attached to can form a ring.

[1230] For example, any alkyl, alkenyl, cycloalkyl, heterocyclyl, heteroaryl or aryl is optionally substituted with 1, 2, 3, 4 or 5 groups selected from OH, CN, —SC(O)Ph, oxo (═O), SH, SO₂NH₂, SO₂(C₁-C₄)alkyl, SO₂NH(C₁-C₄)alkyl, halogen, carbonyl, thiol, cyano, NH₂, NH(C₁-C₄)alkyl, N[(C₁-C₄)alkyl]₂, C(O)NH₂, COOH, COOMe, acetyl, (C₁-C₅)alkyl, O(C₁-C₈)alkyl, O(C₁-C₈)haloalkyl, (C₂-C₈)alkenyl, (C₂-C₈)alkynyl, haloalkyl, thioalkyl, cyanomethylene, alkylaminyl, aryl, heteroaryl, substituted aryl, NH₂—C(O)-alkylene, NH(Me)-C(O)-alkylene, CH₂C(O)-alkyl, C(O)-alkyl, alkylcarbonylaminyl, CH₂—[CH(OH)]ₘ—(CH₂)ₚ—OH, CH₂—[CH(OH)]ₘ—(CH₂)ₚ—NH₂ or CH₂-aryl-alkoxy; “m” and “p” are independently 1, 2, 3, 4, 5 or 6.

[1231] In some embodiments, an optionally substituted group is substituted with 1 substituent. In some other embodiments, an optionally substituted group is substituted with 2 independently selected substituents, which can be same or different. In some other embodiments, an optionally substituted group is substituted with 3 independently selected substituents, which can be same, different or any combination of same and different. In still some other embodiments, an optionally substituted group is substituted with 4 independently selected substituents, which can be same, different or any combination of same and different. In yet some other embodiments, an optionally substituted group is substituted with 5 independently selected substituents, which can be same, different or any combination of same and different.

[1232] An “isocyanato” group refers to a NCO group.

[1233] A “thiocyanato” group refers to a CNS group.

[1234] An “isothiocyanato” group refers to a NCS group.

[1235] “Alkoyloxy” refers to a RC(═O)O— group.

[1236] “Alkoyl” refers to a RC(═O)— group.

[1237] It should be understood that this disclosure is not limited to the particular methodology, protocols, and reagents, etc., provided herein and as such may vary. The terminology used herein is for the purpose of describing particular embodiments only, and is not intended to limit the scope of the present disclosure, which is defined solely by the claims. The invention is further illustrated by the following example, which should not be construed as further limiting.

[1238] Groupings of alternative elements or embodiments of the invention disclosed herein are not to be construed as limitations. Each group member can be referred to and claimed individually or in any combination with other members of the group or other elements found herein. One or more members of a group can be included in, or deleted from, a group for reasons of convenience and/or patentability. When any such inclusion or deletion occurs, the specification is herein deemed to contain the group as modified thus fulfilling the written description of all Markush groups used in the appended claims.

[1239] The description of embodiments of the disclosure is not intended to be exhaustive or to limit the disclosure to the precise form disclosed. While specific embodiments of, and examples for, the disclosure are described herein for illustrative purposes, various equivalent modifications are possible within the scope of the disclosure, as those skilled in the relevant art will recognize. For example, while method steps or functions are presented in a given order, alternative embodiments may perform functions in a different order, or functions may be performed substantially concurrently. The teachings of the disclosure provided herein can be applied to other procedures or methods as appropriate. The various embodiments described herein can be combined to provide further embodiments. Aspects of the disclosure can be modified, if necessary, to employ the compositions, functions and concepts of the above references and application to provide yet further embodiments of the disclosure. Moreover, due to biological functional equivalency considerations, some changes can be made in protein structure without affecting the biological or chemical action in kind or amount. These and other changes can be made to the disclosure in light of the detailed description. All such modifications are intended to be included within the scope of the appended claims.

[1240] Specific elements of any of the foregoing embodiments can be combined or substituted for elements in other embodiments. Furthermore, while advantages associated with certain embodiments of the disclosure have been described in the context of these embodiments, other embodiments may also exhibit such advantages, and not all embodiments need necessarily exhibit such advantages to fall within the scope of the disclosure.

### EXAMPLES

[1241] The technology described herein is further illustrated by the following examples which in no way should be construed as being further limiting.

### Example 1

[1242] Therapeutics that act through the RNA interference (RNAi) pathway prevent production of disease-causing proteins (1-3). Synthetic small interfering RNA (siRNAs), which induce gene silencing via the endogenous RNAi process, are chemically modified to increase stability against nuclease degradation, to facilitate their cellular uptake through cell-membrane, and to reduce their immune stimulation (4,5). The first RNAi drug to be approved for clinical use was patisiran (ONPATTRO®), which is used to treat patients with polyneuropathy caused by hereditary ATTR amyloidosis. This siRNA is partially modified with 2′-O-methyl (2′-OMe) and encapsulated in lipid nanoparticles (6). A second RNAi therapeutic, givosiran (GIVLAARI®) has been approved for the treatment of acute hepatic porphyrias (7,8). More recently, both US FDA and EMA have approved a third RNAi drug, lumasiran (OXLUMO®) for the treatment of primary hyperoxaluria type 1 in all age groups (9), and EMA has approved the fourth RNAi drug, inclisiran (Leqvio®) for the treatment of adults with heterozygous familial hypercholesterolemia (10-12). These three compounds are fully modified with 2′-fluoro (2′-F) and 2′-O-methyl (2′-OMe) (FIG. 1) to confer stability in the absence of a lipid. These modifications are tolerated by the endonuclease silencer enzyme Argonaute-2 (Ago2), the catalytic component of the RNA-induced silencing complex (RISC) (13-17). The passenger strands of these siRNAs are conjugated with a tri-N-acetylgalactosamine (GalNAc; FIG. 1B), which interacts with the asialoglycoprotein receptor that is highly expressed on hepatocytes, to facilitate specific delivery into the liver (8,9,12,18).

[1243] Gene silencing activity of siRNA with GalNAc conjugated on either 3′-AS (II, IV and VI) or 3′-S(I, III and V) strand in the presence or absence of a transfection agent. Activity of siRNA under transfection conditions indicate intrinsic potency whereas free uptake represents ASGPR receptor mediated intercellular transport activity through GalNAc ligand. For 3′-AS GalNAc conjugation, effect of PS removal from the overhang was also evaluated. For all three targets, siRNA activity and potency is maintained for 3′-AS against 3′-S GalNAc conjugation. Removal of phosphorothioate from the overhang connecting GalNAc did not show any change in activity under in vitro conditions.

[1244] Among the four approved siRNA drugs till date from Alnylam Pharmaceuticals Inc (Onpattro, Givlaari, Oxlumo and Leqvio), except Onpattro ¹, all siRNA drugs are composed of trivalent GalNAc conjugation at 3′-end of sense strand ²⁻⁷. Vutrisiran is another 3′-sense GalNAc conjugate shown promising Phase 3 results in Helios-A study. (Ref). ALN-AGT for hypertension and ALN-HBV02 (Vir 2108) are other GalNAc conjugates which have shown promising PhaseI/II results.

### Materials and Methods

siRNA Synthesis

[1245] Sterling solvents and reagents for the ABI synthesizer, 500-Å CPG solid-supports, and 2′-deoxy, 2′-O-methyl (2′-O-Me), and 2′-deoxy-2′-fluoro (2′-F) phosphoramidites were all purchased from ChemGenes and used as received. Low-water content acetonitrile was purchased from EMD Chemicals. Oligonucleotides were synthesized on an ABI-394 DNA/RNA synthesizer. A solution of 0.25 M 5-(S-ethylthio)-1H-tetrazole in acetonitrile was used as the activator. The phosphoramidite solutions were prepared at concentrations of 0.15 M in anhydrous acetonitrile. The oxidizing reagent was 0.02 M I₂ in THF/pyridine/H₂O. N,N-Dimethyl-N′-(3-thioxo-3H-1,2,4-dithiazol-5-yl) methanimidamide, 0.1 M in pyridine, was used as the sulfurizing reagent. The detritylation reagent was 3% dichloroacetic acid in dichloromethane. After completion of the automated synthesis, the solid support was washed with 0.1 M piperidine in acetonitrile for 10 min, then washed with anhydrous acetonitrile and dried with argon. Oligonucleotides were manually deprotected using a mixture of 30% NH₄OH/absolute ethanol (3:1, v/v; 0.5 mL/umol of solid support) for 6 h at 55° C. Solvent containing oligonucleotide was collected by filtration and stored at −20° C. prior to purification.

[1246] The crude oligonucleotides were purified by anion-exchange HPLC on an AKTA Purifier-100 chromatography system using a AP-1 glass column (10×200 mm, Waters) custom-packed with the DNA TSK-Gel Super Q-5 PW support (TOSOH Bioscience). The desired product was purified to >85% using a linear gradient of 0.22 M to 0.42 M NaBr in 0.02 M sodium phosphate, pH 8.5/15% (v) acetonitrile over 120-150 min at room temperature and then desalted by size exclusion chromatography on an AKTA Prime chromatography system using an AP-2 glass column (20×300 mm, Waters) custom-packed with Sephadex G25 (GE Healthcare) eluted with sterile nuclease-free water.

[1247] Oligonucleotides were analyzed by ion-exchange HPLC using a Thermo DNAPac Pa200 analytical column (4×250 mm). Buffer A was 0.025 M Tris-HCl, 1 mM EDTA in 15% CH₃CN, pH 8, and buffer B was buffer A plus 1 M NaBr in 15% CH₃CN, pH 8. A gradient of 25 to 56% B over 21.5 min at a flow rate of 1.0 mL/min was used. The column temperature was 75° C. Oligonucleotides were also analyzed by LC/ESI-MS on a Waters XBridge C₈ column (2.1×50 mm, 2.5 μm). Buffer A was 95 mM 1,1,1,3,3,3-hexafluoro-2-propanol/16 mM triethylamine in water, and buffer B was 100% methanol. A gradient from 2% to 29% B over 26.8 min with flow rate of 0.25 mL/min was employed. The column temperature was 60° C. The oligonucleotide sequences and chemical modification and mass spectroscopy data are summarized in Table 1.

TABLE 1
RNA Oligonucleotides: Chemical modifications, sequence
information and analytical characterization

| | | | | SEQ | | | |
|---|---|---|---|---|---|---|---|
| | | S/AS | Sequence | ID | Chemis- | Mass | |
| Target^{[a]} | Duplex ID | (LN) | (5′-3′)^{[b]} | NO. | try^{c} | Calcd. | Found |
| mTTR | I 57727 | S | A•a•CaGuGuUCUuGc | 36 | A | 8590.17 | 8588.81 |
| (ESC)^{[c]} | | (21) | UcUaUaAL96 | | | | |
| | | AS | u•U•aUaGaGcAagaA | 37 | | 7595.94 | 7594.58 |
| | | (23) | cAcUgUu•u•u | | | | |
| | II 77197 | S | A•a•CaGuGuUCUuGc | 38 | B | 6833.34 | 6832.18 |
| | | (21) | UcUaU•a•A | | | | |
| | | AS | u•U•aUaGaGcAagaA | 39 | | 9384.90 | 9383.53 |
| | | (23) | cAcUgUu•u•uL96 | | | | |
| | VII 80301 | S | A•a•CaGuGuUCUuGc | 40 | C | 6833.34 | 6832.18 |
| | | (21) | UcUaU•a•A | | | | |
| | | AS | u•U•aUaGaGcAagaA | 41 | | 9352.77 | 9351.18 |
| | | (23) | cAcUgUuuuL96 | | | | |
| | VIII 155481 | S | A•a•CaGuGuUCUuGc | 42 | D | 8622.30 | 8621.28 |
| | | (21) | UcUaU•a•AL96 | | | | |
| | | AS | u•U•aUaGaGcAagaA | 43 | | 7595.94 | 7594.58 |
| | | (23) | cAcUgUu•u•u | | | | |
| | IX 155482 | S | A•a•CaGuGuUCUuGc | 44 | C | 8590.17 | 8588.81 |
| | | (21) | UcUaUaAL96 | | | | |
| | | AS | u•U•aUaGaGcAagaA | 45 | | 9320.77 | 9319.95 |
| | | (23) | cAcUgUudTdTL96 | | | | |
| | X 155483 | S | A•a•CaGuGuUCUuGc | 46 | B | 8590.17 | 8588.81 |
| | | (21) | UcUaUaAL96 | | | | |
| | | AS | u•U•aUaGaGcAagaA | 47 | | 9352.90 | 9352.00 |
| | | (23) | cAcUgUu•dT•dTL96 | | | | |
| | XI 157476 | S | a•A•aCaGuGuUCUuG | 48 | B | 7176.57 | |
| | | (22) | cUcUaU•a•A | | | | |
| | | AS | u•U•aUaGaGcAagaA | 49 | | 9064.71 | |
| | | (22) | cAcUgU•u•uL96 | | | | |
| | XII 157477 | S | a•A•aCaGuGuUCUuG | 50 | B | 7176.57 | |
| | | (22) | cUcUaU•a•A | | | | |
| | | AS | u•U•aUaGaGcAagaA | 51 | | 9384.90 | 9383.53 |
| | | (23) | cAcUgUu•u•uL96 | | | | |
| | XIII 192409 | S | A•a•CaGuGuUCUuGc | 52 | B | 6833.34 | 6832.18 |
| | | (21) | UcUaU•a•A | | | | |
| | | AS | u•U•aUaGaGcAagaA | 53 | | 8744.51 | |
| | | (21) | cAcUg•U•uL96 | | | | |
| | XIV 192410 | S | A•a•CaGuGuUCUuGc | 54 | B | 6833.34 | 6832.18 |
| | | (21) | UcUaU•a•A | | | | |
| | | AS | u•U•aUaGaGcAagaA | 55 | | 9064.71 | |
| | | (22) | cAcUgU•u•uL96 | | | | |
| | XV 77196 | S | A•a•CaGuGuUCUuGc | 56 | B | 6833.34 | 6832.18 |
| | | (21) | UcUaU•a•A | | | | |
| | | AS | u•U•aUaGaGcAagaA | 57 | | 9993.28 | 9991.56 |
| | | (25) | cAcUgUu•u•udTdTL | | | | |
| | | | 96 | | | | |
| | XVI80302 | S | A•a•CaGuGuUCUuGc | 58 | B | 6833.34 | 6832.18 |
| | | (21) | UcUaU•a•A | | | | |
| | | AS | u•U•aUaGaGcAagaA | 59 | | 9993.28 | 9991.73 |
| | | (25) | cAcUgUuuu•dT•dTL | | | | |
| | | | 96 | | | | |
| C5 | III 58641 | S | U•g•AcAaAaUAAcUc | 60 | A | 8627.29 | 8625.59 |
| (ESC) | | (21) | AcUaUaAL96 | | | | |
| | | AS | u•U•aUaGuGaGuuaU | 61 | | 7551.83 | 7550.53 |
| | | (23) | uUuGuCa•a•u | | | | |
| | IV 81865 | S(21) | U•g•AcAaAaUAAcUc | 62 | B | 6870.46 | 6869.46 |
| | | | AcUaU•a•A | | | | |
| | | AS | u•U•aUaGuGaGuuaU | 63 | | 9340.79 | 9339.39 |
| | | (23) | uUuGuCa•a•uL96 | | | | |
| | XVII 81866 | S | U•g•AcAaAaUAAcUc | 64 | C | 6870.46 | 6869.46 |
| | | (21) | AcUaU•a•A | | | | |
| | | AS | u•U•aUaGuGaGuuaU | 65 | | 9308.657 | — |
| | | (23) | uUuGuCaauL96 | | | | |
| FXII | VI 81867 | S | g•a•aacuCaAUAaag | 66 | B | 6999.73 | 6998.67 |
| (advanced | | (21) | ugcuu•u•a | | | | |
| ESC) | | AS | u•A•aagCacuuuauU | 67 | | 9399.00 | 9397.78 |
| | | (23) | gAguuuc•u•gL96 | | | | |
| | XVIII 81868 | S | g•a•aacuCaAUAaag | 68 | C | 6999.73 | 7608.39 |
| | | (21) | ugcuu•u•a | | | | |
| | | AS | u•A•aagCacuuuauU | 69 | | 9366.87 | 9365.62 |
| | | (23) | gAguuucugL96 | | | | |
| | V 74210 | S | g•a•aacuCaAUAaag | 70 | A | 8756.56 | 8755.62 |
| | | (21) | ugcuuuaL96 | | | | |
| | | AS | u•A•aagCacuuuauU | 71 | | 7610.04 | 7608.39 |
| | | (23) | gAguuuc•u•g | | | | |
| SS | XIX 319053 | AS | VPu•U•aU•aG•aG•c | 72 | | 9605.49 | 9604.05 |
| | | (23) | A•ag•aA•cA•cU•gU | | | | |
| | | | •u•u•uL96 | | | | |
| | XX 319054 | AS | VPu•U•au•aG•aG•C | 73 | | 9657.66 | 9655.78 |
| | | (23) | •aa•ga•A•cA•cu•g | | | | |
| | | | u•u•u•uL96 | | | | |

^{[a]}siRNA targeting mRNA encoding mouse transthyretin (mTTR)
^{[b]}S and AS indicate sense and antisense strands Italicized upper case and normal lower case letters indicate 2′-deoxy-2′-fluoro, and 2′-O-methyl sugar modifications, respectively, to adenosine (A), cytidine (C), guanosine (G) and uridine (U); dT indicate deoxythymidine;
•Indicate phosphorothioate (PS) linkage. (LN) = length of nucleotide.
^{[c]}ESC - Enhanced Stable Chemistry for providing improved metabolic stability (See, for example, WO2016/028649, content of which is incorporated herein by reference in its entirety), and advanced ESC - Enhanced Stable Chemistry for providing improved metabolic stability with off-target mitigation modification (see, for example, WO2018/098328 and WO2019/222479, contents of which are incorporated herein by reference in their entireties).

[1248] To generate siRNA duplexes, equimolar amounts of purified complementary strands were mixed to a final concentration of 20 μM in PBS, pH 7.4., heated in a water bath at 95° C. for 5 min, and cooled to room temperature over a period of approximately 12 h.

Analysis of Binding of siRNAs to ASGPR

[1249] Binding of siRNAs to ASGPR was evaluated using a previously described flow cytometry-based competitive binding assay.⁸ In brief, freshly isolated hepatocytes were resuspended at 1 million cells per mL in Dulbecco's Modified Eagle Medium (DMEM, Life Technologies) with 2% bovine serum albumin (BSA, Sigma-Aldrich). GalNAc3-conjugated, Alexa647-labeled siRNA described previously⁹ was diluted to a final concentration of 20 nM and was premixed with the siRNA to be evaluated at concentrations from 3 μM to 1.4 nM in 2% BSA in DMEM. To the siRNA solution was added 100,000 hepatocytes, and samples were incubated at 4° C. for 15 min. Cells were washed twice with 2% BSA in Dulbecco's Phosphate-Buffered Saline with magnesium and calcium (DPBS, Life Technologies). Cells were suspended in a solution of 2% BSA in DPBS with 2 μg/mL propidium iodide and analyzed on an LSRII flow cytometer instrument (BD Biosciences). Compensation was performed using Diva software (BD Biosciences). Hepatocytes were gated by size using forward scatter and side scatter, and dead cells stained with propidium iodide were excluded from analysis. Median fluorescent intensity of the GalNAc3-conjugated, Alexa647-labeled siRNA was quantified. Data were analyzed using FlowJo and GraphPad Prism.

### In Vitro Analysis of Gene Silencing

[1250] siRNAs were transfected into primary mouse hepatocytes or were analyzed after allowing free uptake. For transfection, 4.9 μl of Opti-MEM (Life Technologies), 0.1 μl of Lipofectamine RNAiMax (Invitrogen), and 5 μl of siRNA duplex were added to wells of a 384-well plate. After incubation at room temperature for 15 min, 40 μl of William's E Medium (Life Technologies) supplemented with 10% fetal bovine serum (Life Technologies) containing approximately 5×10³ cells were added to each well. Cells were incubated for 24 h, and then RNA was isolated. Free uptake experiments with primary mouse hepatocytes were performed by adding 5 μl of Opti-MEM to 5 μl of siRNA in wells of a 384-well plate. We then added approximately 5×10³ cells in 40 μl of William's E Medium with 10% fetal bovine serum (Life Technologies) to the siRNA. Cells were incubated for 48 h, and then RNA was isolated.

[1251] RNA was isolated using an automated protocol on a BioTek-EL406 platform using Dynabeads (Invitrogen). Briefly, 70 μl of Lysis/Binding Buffer and 10 μl of Lysis Buffer supplied with the Dynabeads containing 3 μl of magnetic beads were added to the plate with cells. Plates were incubated on an electromagnetic shaker for 10 min at room temperature, and then the magnetic beads were captured, and the supernatant was removed. Bead-bound RNA was then washed twice with 150 μl 10 mM Tris-HCl, pH 7.5, 150 mM LiCl, 1 mM EDTA, pH 8, and 0.10% lithium dodecyl sulfate and once with 10 mM Tris-HCl, pH 7.5, 150 mM LiCl, and 1 mM EDTA, pH 8. Beads were then washed with 150 μl 10 mM Tris-HCl, pH 7.5, re-captured, and supernatant removed. All buffers were purchased from Invitrogen.

[1252] The RNA of interest was quantified using RT-PCR. cDNA synthesis was performed from a 250-ng sample of RNA using the ABI High-capacity cDNA reverse transcription kit following the manufacturer's protocol. For each gene of interest, a pair of unlabeled PCR primers and a TaqMan probe were designed and synthesized. The probe was conjugated to VIC at the 5′ end and a minor groove binder, non-fluorescent quencher at the 3′ end. Target gene expression was normalized to Gapdh amplified in each well utilizing a dual-label system; the control probe targeting Gapdh was labeled with FAM. A 2 μl aliquot of cDNA was added to a master mix containing 0.5 μl of Gapdh, 0.5 μl target probe, and 5 μl Lightcycler 480 probe master mix (all from Roche) per well in a 384-well plate (Roche). Real-time PCR was performed in a LightCycler480 Real Time PCR system (Roche). Ct values were measured using a Roche Light Cycler 480. The following formula was used to determine relative gene expression: 2^{-(Ct Target)}/2^{-(Ct Control)}. Each experiment was performed at least twice. To calculate relative fold change, data were analyzed using the ΔΔCt method and normalized to data on cells transfected with a non-targeting control siRNA of the same chemistry. The following probes were used (all from ThermoFisher): GAPDH probe (4352339E), C5 probe (Mm00439275_m1), TTR probe (Mm00443267_m1), FXII probe (Mm00491349_m1), and CTNNB1 probe (Mm00483039_m1).

In Vivo Evaluation of siRNA-Mediated Silencing

[1253] In vivo experiments were conducted in 6-8 week-old female C₅₇BL/6 or Balb/c mice acquired from Charles River Laboratories. All studies were conducted at Alnylam Pharmaceuticals in accordance with animal procedures reviewed and approved by the Institutional Animal Care and Use Committee. Animals were administered siRNA or PBS (Gibco) via subcutaneous injection. Animals were sacrificed at time points ranging from 1 to 28 days post-dose.

[1254] Livers were harvested and snap frozen for analysis of the hepatic mRNA of interest. Total RNA was isolated using QIAzol reagent (Qiagen) or using the Qiagen RNAeasy kit. RNA concentrations were determined using a Nanodrop spectrophotometer (ThermoFisher Scientific). The RNA concentrations were adjusted to 25 ng/μl, and cDNA was synthesized from 250 ng of sample using a reverse transcription kit from Applied Biosystems. RT-PCR was employed for RNA quantification as described in the section on analysis of in vitro activity.

[1255] Blood was collected utilizing the retro-orbital eye bleed procedure at selected time points to assess levels of proteins of interest. For this procedure, the mice were anesthetized using isoflurane. Heparin-coated capillary tubes (Fisher Scientific) were inserted into the posterior corner of the mouse eye; the tube was inserted at a 45-degree angle to approximately 1 cm and rotated until the blood from the retro-orbital sinus was released. Approximately 200 μl was collected from the left eye of each mouse according to the IACUC protocol for blood collection. The blood was collected in Becton Dickinson (BD) serum separator tubes. Serum samples obtained for analysis of proteins other than C₅ were kept at room temperature for 1 h and then spun in a microcentrifuge at 22× g at room temperature for 10 minutes. Serum was transferred to 1.5-ml microcentrifuge tubes for storage at −80° C. until samples were processed.

[1256] For analysis of serum TTR levels, serum samples were diluted 1:4000 and assayed using an ELISA (ALPCO, catalog number 41-PALMS-E01). Protein concentrations were determined by comparison to a TTR standard prepared in-house.

Evaluation of In Vivo RISC Loading and Liver Levels of siRNA

[1257] In vivo RISC loading was evaluated according to a published procedure.¹⁰ Ago2-bound siRNA from mouse liver was quantified by preparing liver powder lysates at 100 mg/mL in 50 mM Tris-HCl, pH 7.5, 150 mM NaCl, 2 mM EDTA, 0.5% Triton-X 100 supplemented with freshly added protease inhibitors (Sigma-Aldrich, P8340) at 1:100 dilution and 1 mM PMSF (Life Technologies). Total liver lysate (10 mg) was used for each Ago2 immunoprecipitation (IP) and control IP. Anti-Ago2 antibody was purchased from Wako Chemicals (Clone No.: 2D4). Control mouse IgG was from Santa Cruz Biotechnology (sc-2025). Protein G Dynabeads (Life Technologies) were used to precipitate antibodies. Ago2-associated siRNAs were eluted by heating in 50 μL PBS, 0.25% Triton (95° C., 5 min) and quantified by stem-loop RT-qPCR as described previously.¹¹⁻¹²

[1258] Determination of liver levels of siRNA-GalNAc conjugates were performed according to a previously published procedure.¹³ Mice were sacrificed on day 5 (mTTR and C₅ experiments) or day 9 (FXII experiment) post-dose, and livers were snap frozen in liquid nitrogen and ground into powder. Total siRNA liver levels were measured by reconstituting liver powder at 10 mg/mL in PBS containing 0.25% Triton-X 100. The tissue suspension was ground with 5-mm steel grinding balls at 50 cycles/second for 5 min in a tissue homogenizer (Qiagen TissueLyser LT) at 4° C. Homogenized samples were then heated at 95° C. for 5 min, briefly vortexed, and allowed to rest on ice for 5 min. Samples were then centrifuged at 21,000×g for 5 min at 4° C. The siRNA-containing supernatants were transferred to new tubes. siRNA sense and guide strand levels were quantified by stem-loop RT-qPCR.¹¹⁻¹²

### Results

GalNAc Conjugation to the 3′ End of the siRNA Antisense Strand does not Impair Silencing in Vitro

[1259] siRNAs targeting mouse TTR were prepared with GalNAc conjugated at the 3′ termini of the sense strands, the typical design, or with the GalNAc conjugated to the 3′ termini the antisense strands (FIG. 1 and Table X). The siRNAs with sense strand conjugation contained six phosphorothioate linkages and were modified with chemical modifications as described earlier.⁹ The second set of siRNAs were conjugated at the 3′ end of the antisense strand to GalNAc, contained eight phosphorothioate linkages, and were modified with same chemistries.

[1260] The affinities of these siRNAs for a complementary oligoribonucleotide were determined using a fluorescence-based assay. siRNAs with the triantennary GalNAc unit conjugated to the 3′ end of antisense strand had affinities for ASGPR similar to that of siRNAs in which GalNAc was conjugated to the 3′ end of sense strand (FIG. 2).

[1261] The ASGPR binding affinities of the conjugated GalNAc moieties to siRNA were determined using a fluorescence-based assay.⁸ The siRNAs with GalNAc conjugated to the 3′ end of antisense strand had affinities for ASGPR similar to that of the parent designs in which GalNAc was conjugated to the 3′ end of sense strand (FIG. 2 and Table 2).

TABLE 2
ASGPR binding affinities of the conjugated
GalNAc moieties to siRNA

| Duplex | KI(nM) | Std. deviation |
|---|---|---|
| I | 51.1 | 8.6 |
| II | 24.1 | 2.7 |
| III | 43.8 | 4.8 |
| IV | 44.0 | 4.9 |
| V | 42.9 | 5.0 |
| VI | 34.7 | 9.7 |

[1262] Silencing of TTR expression was evaluated in primary mouse hepatocytes in the presence or absence of a transfection agent. Activity of siRNA under transfection conditions indicates intrinsic potency, whereas that under free-uptake conditions is also a measure of ASGPR-mediated internalization. For siRNAs conjugated to GalNAc at the 3′ end of the antisense strand, the effect of the phosphorothioate linkages in the overhang were also evaluated (Table 3). For TTR-targeted siRNAs, analysis of TTR mRNA showed no significant differences in activity for siRNAs with the GalNAc ligand on the 3′ end of the sense strand versus the antisense strand (Table 3). Removal of phosphorothioate from the overhang connecting GalNAc to the 3′ end of the antisense strand was not detrimental under in vitro conditions (Table 3).

TABLE 3
siRNAs targeting TTR, affinity for ASGPR,
and in vitro silencing.

| | | | | | IC₅₀ [nm]^{[d]} | |
|---|---|---|---|---|---|---|
| | | | SEQ | | Trans- | Free |
| Duplex | S/AS | Sequence | ID | | fec- | up- |
| ID | (length)^{[a]} | 3(5′-′)^{[b]} | NO. | Kᵢ[nm]^{[c]} | tion | take |
| I | S (21) | A•a•CaGuGuUC | 74 | 51.1 ± 8.6 | 0.0451 | 0.1023 |
| | | UuGcUcUaUaA-L96 | | | | |
| | AS (23) | u•U•aUaGaGcA | 75 | | | |
| | | agaAcAcUgUu•u•u | | | | |
| II | S (21) | A•a•CaGuGuUC | 76 | 24.1 ± 2.7 | 0.0368 | 0.1074 |
| | | UuGcUcUaU•a•A | | | | |
| | AS (23) | u•U•aUaGaGcA | 77 | | | |
| | | agaAcAcUgUu•u•u-L96 | | | | |
| VII | S (21) | A•a•CaGuGuUC | 78 | n.d. | 0.0497 | 0.1414 |
| | | UuGcUcUaU•a•A | | | | |
| | AS (23) | u•U•aUaGaGcA | 79 | | | |
| | | agaAcAcUgUuuu-L96 | | | | |
| VIII | S (21) | A•a•CaGuGuUC | 80 | n.d. | 0.162 | 0.134 |
| | | UuGcUcUaU•a•A | | | | |
| | AS (23) | u•U•aUaGaGcA | 81 | | | |
| | | agaAcAcUgUu•u•u | | | | |
| IX | S (21) | A•a•CaGuGuUC | 82 | n.d. | 0.069 | 0.286 |
| | | UuGcUcUaU•a•A | | | | |
| | AS (23) | u•U•aUaGaGcA | 83 | | | |
| | | agaAcAcUgUudTdT-L96 | | | | |
| X | S (21) | A•a•CaGuGuUC | 84 | n.d. | 0.072 | 0.139 |
| | | UuGcUcUaU•a•A | | | | |
| | AS (23) | u•U•aUaGaGcA | 85 | | | |
| | | agaAcAcUgUu•dT•dT-L96 | | | | |
| XV | S (21) | A•a•CaGuGuUC | 86 | n.d. | | |
| | | UuGcUcUaU•a•A | | | | |
| | AS (25) | u•U•aUaGaGcA | 87 | | | |
| | | agaAcAcUgUu•u•udTdT-L96 | | | | |
| XVI | S (21) | A•a•CaGuGuUC | 88 | n.d. | | |
| | | UuGcUcUaU•a•A | | | | |
| | AS (25) | u•U•aUaGaGcA | 89 | | | |
| | | agaAcAcUgUuuu•dT•dT-L96 | | | | |

^{[a]}S and AS indicate sense and antisense strands. Length in nucleotides of each strand is given in parentheses.
^{[b]}Italicized upper case and normal lower case letters indicate 2′-deoxy-2′-fluoro, and 2′-O-methyl sugar modifications, respectively, to adenosine (A), cytidine (C), guanosine (G) and uridine (U); dT indicates deoxythymidine;
•indicates phosphorothioate linkage; L96 indicates GalNAc.
^{[c]}Binding affinity to ASGPR (on mouse primary hepatocytes, fluorescent based assay).
^{[d]}Half maximal inhibitory concentration (IC₅₀) for in vitro gene silencing under transfection (Lipofectamine RNAiMAX) or free uptake conditions in primary mouse hepatocytes.

[1263] To confirm that this finding was broadly relevant, silencing in vitro by siRNAs targeting C5 and FXII was evaluated. For all three targets, siRNA activity and potency was maintained despite conjugation of the GalNAc ligand to the 3′ end of the antisense strand. Results are shown in FIGS. 3A-3C and summarized in Table 4.

TABLE 4
IC₅₀ (nM)

| | mTTR (ESC) | | | C5 (ESC) | | | FXII (advanced ESC) | |
|---|---|---|---|---|---|---|---|---|
| Duplex | | Free | Duplex | | Free | Duplex | | Free |
| No. | Transfection | Uptake | No. | Transfection | Uptake | No. | Transfection | Uptake |
| I | 0.0087 | 0.208 | III | 0.488 | 0.341 | V | 0.972 | 0.881 |
| II | 0.0074 | 0.799 | IV | 0.304 | 0.113 | VI | 0.937 | 0.776 |
| VII | 0.0090 | 0.465 | XVII | 0.362 | 0.102 | XVIII | 0.821 | 4.169 |

In Vivo Activity of siRNA is not Impaired by GalNAc Conjugation to the Antisense Strand

[1264] It was previously demonstrated that the siRNA with GalNAc conjugated to 3′ end of the sense strand of the siRNA (I) significantly reduces levels of circulating TTR protein in C57BL/6 mice.¹⁴ To evaluate the 3′-antisense conjugation, mice were treated subcutaneously with the parent siRNA (I) at 1 mg/kg and with the 3′-antisense conjugate (II) at 0.5 and 1 mg/kg. Levels of circulating TTR protein were analyzed after 96 and 168 hours. The designs resulted in comparable reductions in TTR at the 1 mg/kg dose (FIG. 4). Furthermore, there was a greater reduction in TTR levels at both time points when mice were treated with 1 mg/kg than with 0.5 mg/kg of II.

### In Vivo Activity Depends on Phosphorothioate Linkages and Length of the Antisense Strand

[1265] In the parent design with the GalNAc at the 3′ end of the sense strand, there are six phosphorothioate linkages. In the design used for the 3′-antisense-strand conjugate, there are eight phosphorothioate linkages as two phosphorothioates were introduced at the 3′ end of the sense strand to protect that terminus from nucleases. The GalNAc is conjugated to the oligonucleotide through a trans-4-hydroxyprolinol linker.⁹ Without wishing to be bound by a theory, the linker and the bulky ligand may provide enough nuclease protection that presence of the two phosphorothioates are not needed at the 3′ end of the antisense strand. To analyze this, mice were treated with siRNA II, which has two phosphorothioate linkages at the 3′ end of the antisense strand, and with siRNA VII, which has phosphodiester bonds at these positions. The siRNAs were administrated subcutaneously, and levels of circulating TTR protein were analyzed 4, 7, 10, 14, and 21 days post-dose. Results are shown in FIG. 5. At 1 mg/kg, the siRNA with eight phosphorothioate linkages (II) was more efficacious than the siRNA with six phosphorothioate linkages: the maximum reduction in TTR was 75% for II but only 40% for VII. The siRNA with eight phosphorothioate linkages also had longer duration of action (FIG. 5). At the highest dose evaluated, siRNA VII had high activity (75% reduction at 96 hours), but its activity had returned close to baseline within 10 days. At 10 days post-dose, levels of TTR were reduced by approximately 60% compared to the control by a 1 mg/kg dose of II. Thus, phosphorothioate linkages are required at the 3′ end of the antisense strand in this design. This effect was not observed in vitro conditions, most likely due to a more favorable nuclease environment.

[1266] In the siRNAs comprising sense strand of length 21 nucleotides and antisense strand of length of 23 nucleotides, incorporation of the phosphorothioate linkages at the 3′-end of the antisense improved the potency and duration of activity. As seen from FIG. 5, siRNA II (8 phosohorothioate linkages) out-performed siRNA VII (6 phosohorothioate linkages).

### In Vivo Evaluation of 3′-Sense to 3′-Antisense GalNAc Conjugation: 6 PS and 8 PS Designs

[1267] As seen from the data shown in FIGS. 6A and 6B, siRNAs comprising GalNAc comprising 8 phosphorothioates and GalNAc linked to the 3′-end of the sense strand (VIII) or 3′-end of the antisense strand (II) showed equivalent potency.

Effect of DNA Guide Strand (with or without PS) on Overhang: (21/23 with Two Different Chemistries: DNA and 2′-OMe)

[1268] The activity of siRNAs comprising different chemistries in the overhang were evaluated. The 2′-OMe-uridines in in the overhang were replaced by their DNA counterpart, i.e., 2′-deoxythymidines. If DNA is not stabilized by phosphorothioate backbone, it can be susceptible to nuclease degradation. The increased length was also evaluated. In vivo activities of siRNA IX, DNA overhang with phosphate linkage, and siRNA (X), DNA overhang with phosphorothioate linkage, were studied. siRNA (II) was used as control. All three siRNA (II, IX and X) were dosed to wild type C₅₇BL/6 mice for mouse transthyretin mRNA (Ttr) through single subcutaneous administration at 1 and 2.5 mg/kg dose and levels of circulating TTR protein were analyzed after 168, 336, 504 and 672 h post-dose. Results are shown in FIGS. 7A and 7B. At low (1 mg/kg) dose siRNA (II) and (X) showed similar efficacy and duration. Maximum 75% suppression was observed at day 7 and activity of both siRNA's were recovered to baseline by 28 days post-dose. siRNA (XI) was found out to undergo a loss in potency and duration compared to the other two siRNA used in this experiment. Maximum 30% suppression was observed on day 7 and the activity has returned to baseline on day 14. This loss in activity may be attributed to metabolic liability arising from not having phosphorothioate on overhang, which is exposed single strand. At higher dose (2.5 mg/kg) siRNA (XI) had 40% suppression on day 7 and the activity has returned to baseline on day 14. siRNA (X) showed improved duration (60% suppression on day 28) than siRNA (II) (25% suppression).

[1269] Data in FIGS. 7A and 7B shows:
[1270] At low dose (1 mg/kg) duplexes with PS stabilized overhang (II and X) have comparable activity and duration.
[1271] If DNA overhang is not stabilized with PS then the duplex (IX) does undergo a loss in potency and duration.
[1272] At high dose (2.5 mg/kg) X shows improved duration profile compared to II.
[1273] Most robust and durable PD response observed with SQ administration of X at 2.5 mg/kg (max of >90% TTR suppression)·
[1274] Serum TTR KD observed in comparator groups
[1275] Extra OMe and PS modification (XVI) achieved 80% TTR suppression
[1276] DNA w/out PS (IX) achieved ˜40% TTR suppression
[1277] PS modification of DNA bases improved duration relative to control and other modifications.
[1278] Max suppression by Day 7 with recovery beginning between 14 and 21 days post-dose but still at 60% suppression at day 28
[1279] TTR recovery to baseline observed with XVI and IX conjugates by day 28

[1280] The modifications in the overhang may not be required if the duplex comprises at least 8 phosphorothioates.

Silencing Activity Correlates Well with In Vivo Liver Exposure and RISC Loading of the Antisense Strand in Liver of siRNA Antisense Strand

[1281] Liver level determination of siRNA-GalNAc conjugates were done according to previously published procedure.¹³ Mice were sacrificed on day 5 (mTTR and C5)-post-dose, and livers were snap frozen in liquid nitrogen and ground into powder for further analysis. In-vivo RISC loading was done according to a published procedure¹⁰.

[1282] Ago2 associates with the 5′ end of the antisense strand via its MID domain and with the 3′ end of the antisense strand through the PAZ domain. Alterations in the structure of either of these ends can affect loading and subsequent gene silencing efficiency. We examined the impact of 3′-antisense GalNAc and other siRNA variants on liver stability and their ability to be loaded into Ago2 and form functional RISC complexes. There was comparable loading of the antisense strands of 1, 4, and 2, whereas the level of antisense strand of 3 loaded into RISC was low (FIG. 8B). This finding correlated with the observed decrease in liver Ttr mRNA levels: At 5 days after dosing with 1, 4, and 2, levels of Ttr mRNA in liver were reduced by 67%, 63%, and 61% compared to levels in mice treated with PBS (FIG. 8C). Interestingly, siRNA (3) did not show any mRNA knockdown in liver on day 5. Furthermore, there was a very low level of siRNA 3 present in liver (FIG. 8A). Levels of antisense strands of 1, 4, and 2 were comparable (FIG. 8A).

[1283] Wild-type C₅₇BL/6 mice (n=3) were treated with GalNAc-siRNA at 1 mg/kg single subcutaneous dose. The siRNAs used for this study are shown in FIG. 8A and the results are shown in FIGS. 8B-8D. After 5 days, siRNA (I), (VIII) and (II) consecutively showed 67%, 63% and 61% knockdown of TTR mRNA in liver. Interestingly, siRNA (VII) did not show any mRNA knockdown in liver on day 5. This is supported by very low level of siRNA (VII) present in liver. Overall level of antisense strand present in liver was comparable for siRNA (I), (VIII) and (II) but the level was much lower for (VII). This indicates the lower activity observed for (VII). In vivo Ago2 loading of siRNA was determined according to a published procedure.¹⁰ Similar to previous finding, siRNA (I), (VIII) and (II) had comparable Ago2 loaded antisense strand whereas (VII) had low Ago2 loading. These findings support individual observed activity of siRNAs. [Data: Gene Expression RES17-047 M_qPCR Analysis_09272017]

[1284] In short, the overhang prefers PS over PO and 8 PS construct outperforms 6 PS construct in vivo.

Effect of Architecture of siRNA Duplex with 3′-AS-Conjugates Using mTTR Constructs

### Effect of Length Variation in TTR Silencing Activity

[1285] This study was undertaken to better understand PAZ interaction of guide strand (antisense strand). Standard 23-mer guide strand having GalNAc on 3′-S has 22-mer as an active in vivo metabolite. If these 21- and 22-mer guide strands are active, then this study can facilitate better insight of metabolic stability of antisense constructs. Results are shown in FIGS. 9A and 9B and summarized in Table 5. The results show that
[1286] Evaluation of architecture shows 21/22 (XIV) as the best construct
[1287] Compared to (II) 21/23, (XIV) 21/22 is better and even slightly better than (XIII) (may be due effective loading)
[1288] (XIV) show even longer duration of action compared to (II) and (XIII): 42 Day Study
[1289] (XIV) shows better efficacy and longer duration of action compared to (II), (XIII), (XI) and (XII): 42 day study

TABLE 5

| | | | | | | IC₅₀ [nm]^{e} | |
|---|---|---|---|---|---|---|---|
| | | | | SEQ | | Trans- | Free |
| | Duplex | S/AS | Sequence | ID | Kᵢ | fec- | up- |
| Target^{[a]} | ID | (LN) | (5′-3′)^{[b]} | NO. | [nm]^{d} | tion | take |
| mTTR | XI | S(22) | a•A•aCaGuGuU | 90 | n.d. | 0.068 | 0.116 |
| (ESC)^{[f]} | 157476 | | CUuGcUcUaU•a•A | | | | |
| | | AS(22) | u•U•aUaGaGcA | 91 | | | |
| | | | agaAcAcUgU•u•uL96 | | | | |
| | XII | S(22) | a•A•aCaGuGuU | 92 | n.d. | 0.042 | 0.045 |
| | 157477 | | CUuGcUcUaU•a•A | | | | |
| | | AS(23) | u•U•aUaGaGcA | 93 | | | |
| | | | agaAcAcUgUu•u•uL96 | | | | |
| | XIII | S(21) | A•a•CaGuGuUC | 94 | n.d. | 0.015 | 0.059 |
| | 192409 | | UuGcUcUaU•a•A | | | | |
| | | AS(21) | u•U•aUaGaGcA | 95 | | | |
| | | | agaAcAcUg•U•uL96 | | | | |
| | XIV | S(21) | A•a•CaGuGuUC | 96 | n.d. | 0.108 | 0.250 |
| | 192410 | | UuGcUcUaU•a•A | | | | |
| | | AS(22) | u•U•aUaGaGcA | | | | |
| | | | agaAcAcUg•u•uL96 | | | | |

^{[a]}siRNA targeting mRNA encoding mouse transthyretin (mTTR
^{[b]}S and AS indicate sense and antisense strands Italicized upper case and normal lower case letters indicate 2′-deoxy-2′-fluoro, and 2′-O-methyl sugar modifications, respectively, to adenosine (A), cytidine (C), guanosine (G) and uridine (U); and dT indicate deoxythymidine;
•Indicate phosphorothioate (PS) linkage.
^{d}Binding affinity to ASGPR (on mouse primary hepatocytes, fluorescent based assay).
^{e}Half maximal inhibitory concentration (IC₅₀) for in vitro gene silencing under transfection (Lipofectamine RNAiMAX) or free uptake conditions in primary mouse hepatocytes (LN) = length of nucleotide.
^{[f]}ESC - Enhanced Stable Chemistry for providing improved metabolic stability (See, for example, WO2016/028649, content of which is incorporated herein by reference in its entirety), and advanced ESC - Enhanced Stable Chemistry for providing improved metabolic stability with off-target mitigation modification (see, for example, WO2018/098328
and WO2019/222479, contents of which are incorporated herein by reference in their entireties).

### Increasing the Antisense Length Compromises Activity

[1290] Next, the antisense length was increased from 23 to 25 nucleotides, with a 4 nucleotide overhang to evaluate the possibility of using GalNAc end using a cleavable nucleotide string as a prodrug. Without wishing to be bound by a theory, the increased nucleotide length can function as a prodrug, and if there were steric clash with the linker, ligand and PAZ, the free antisense can be released after the delivery of conjugate. The results showed that
[1291] 3′-end of antisense conjugate display silencing, but less efficiently than II even though 8 PS are present.
[1292] In this 21/25 configuration, cleavable linker is slightly less active and not really helping much (GalNAc may be even lost before reacting tissue) in a overhang phosphodiester nucleotide construct
[1293] Placing the PS at the 24/25 does not help because the cleavage is still possible around 22 and 23. Similarly PS in 22/23 alone is also not sufficient
[1294] Lack of the PS may be compromising the activity
[1295] Overhang stability seems to be important

[1296] The position of the phosphorothioate residues relative to the terminal base pair of the siRNA duplex were varied next. Two siRNAs with four nucleotide overhangs were synthesized (FIG. 10). In siRNA XV, the two phosphorothioates are positioned similarly to those in siRNA II adjacent to the duplex and two dT nucleotides were introduced to extend the length of the overhand. In siRNA XVI, phosphorothioates link the two 3′-most nucleotides. The efficacy of Ttr silencing by siRNAs II and XVI were compared to that of XV in C57BL/6 mice. The siRNAs with the longer overhangs of the 3′ end of the antisense strand were less efficacious than siRNA II.

In Vivo Evaluation of 3′-Antisense GalNAc Conjugated C-5 Target siRNAs with 8 PS and 6 PS

[1297] For mTTR target, the activity of 3′-AS GalNAc conjugated siRNA depends on overhang stability. Activity of siRNA with same motif but targeting a different target, C5, was evaluated. 3′-AS GalNAc conjugated siRNA IV with PS and (XVII) without PS on overhang was dosed to wild type C57BL/6 mice for mouse transthyretin mRNA (mTTR) through single subcutaneous administration at 1.0 mg/kg dose. Their activity was compared against siRNA (III) with 3′-S GalNAc conjugation. Levels of circulating C5 protein were analyzed after 120 h post-dose. Results are shown in FIG. 11A. 3′-S conjugated siRNA (III) showed 50% knockdown whereas 40% knockdown was observed for IV. Interestingly, unlike mTTR siRNA, detrimental effect from removal of PS from the overhang was not seen for C5 siRNA (XVII) showing 36% knockdown. It could be possible that the effect of metabolic instability may be seen at longer duration, which was not covered under experimental snapshot.

[1298] Wild-type C57BL/6 mice (n=3) were treated with GalNAc-siRNA at 1 mg/kg single subcutaneous dose. After 5 days, siRNA (III), (IV) and (XVII) consecutively showed 50%, 40% and 36% knockdown of circulating C₅ protein (FIG. 11A). siRNA (III) with 3′-S GalNAc conjugation and 6PS construct showed 0.13 μg/g antisense loading whereas siRNA (IV) with 3′-AS GalNAc conjugation and 8PS construct showed 0.22 μg/g antisense strand present in liver (FIG. 11B). Sense strand loading was comparable for both siRNAs (0.10 and 0.12 μg/g for III and IV). Overall level of sense (0.02 μg/g) and antisense (0.04 μg/g) present in liver was much lower for siRNA (XVII) (FIG. 11B).

[1299] As seen from FIG. 11C siRNA (III), and (IV) had comparable Ago2 loaded antisense strand in liver (0.21 and 0.26 ng/g respectively) whereas (XVII) had low Ago2 antisense loading (0.08 ng/g). Observed Ago2 loading is concurring with in vivo gene expression for III and IV. Lower level of siRNA present in liver and lower Ago2 loading of (XVII) may be observed in duration study which is missing in this experiment.
[1300] Activity appears to be retained with the GalNAc conjugated to the 3′AS of the C₅ (ESC) sequence
[1301] Observed Ago2 loading is concurring with in vivo gene expression for III and IV
[1302] Lower level of siRNA present in liver and lower Ago2 loading of XVII can be observed in duration study.

TABLE 6

| | | Se- | | | IC₅₀ [nm]^{e} | |
|---|---|---|---|---|---|---|
| | Du- | quence | SEQ | | Trans- | Free |
| Tar- | plex | (5′- | ID | Kᵢ | fec- | up- |
| get^{[a]} | ID | 3′)^{[b]} | NO. | [nm]^{d} | tion | take |
| C5 | III | U•g•Ac | 98 | 43.8 ± | 0.1129 | 0.130 |
| (ESC)^{[f]} | 58641 | AaAaUA | | 4.8 | | |
| | | AcUcAc | | | | |
| | | UaUaAL | | | | |
| | | 96 | | | | |
| | | u•U•aU | 99 | | | |
| | | aGuGaG | | | | |
| | | uuaUuU | | | | |
| | | uGuCa• | | | | |
| | | a•u | | | | |
| | IV | U•g•Ac | 100 | 44.0 ± | 0.0358 | 0.116 |
| | 81865 | AaAaUA | | 4.9 | | |
| | | AcUcAc | | | | |
| | | UaU•a• | | | | |
| | | A | | | | |
| | | u•U•aU | 101 | | | |
| | | aGuGaG | | | | |
| | | uuaUuU | | | | |
| | | uGuCa• | | | | |
| | | a•uL96 | | | | |
| | XVII | U•g•Ac | 102 | n.d. | 0.0794 | 0.127 |
| | 81866 | AaAaUA | | | | |
| | | AcUcAc | | | | |
| | | UaU•a• | | | | |
| | | A | | | | |
| | | u•U•aU | 103 | | | |
| | | aGuGaG | | | | |
| | | uuaUuU | | | | |
| | | uGuCaa | | | | |
| | | uL96 | | | | |

^{[a]}siRNA targeting mRNA encoding C5.
^{[b]}S and AS indicate sense and antisense strands Italicized upper case and normal lower case letters indicate 2′-deoxy-2′-fluoro, and 2′-O-methyl sugar modifications, respectively, to adenosine (A), cytidine (C), guanosine (G) and uridine (U); and dT indicate deoxythymidine;
•Indicate phosphorothioate (PS) linkage.
^{d}Binding affinity to ASGPR (on mouse primary hepatocytes, fluorescent based assay).
^{e}Half maximal inhibitory concentration (IC₅₀) for in vitro gene silencing under transfection (Lipofectamine RNAiMAX) or free uptake conditions in primary mouse hepatocytes (LN) = length of nucleotide.
^{e}Half maximal inhibitory concentration (IC₅₀) for in vitro gene silencing under transfection (Lipofectamine RNAiMAX) or free uptake conditions in primary mouse hepatocytes (LN) = length of nucleotide.
^{[f]}ESC - Enhanced Stable Chemistry for providing improved metabolic stability (See, for example, WO2016/028649, content of which is incorporated herein by reference in its entirety), and advanced ESC - Enhanced Stable Chemistry for providing improved metabolic stability with off-target mitigation modification (see, for example, WO2018/098328
and WO2019/222479, contents of which are incorporated herein by reference in their entireties).

Single-Stranded siRNA Conjugutes do not Function Effectively Even in High Doses

[1303] Activity of single-stranded antisense siRNAs comprising a 3′-conjugate for delivery and a 5′-vinylphosphonate nucleoside for facilitated loading to MID domain were tested. The results are shown in FIGS. 13A-13C and summarized in Table 7.

TABLE 7

| | | | | SEQ | | IC₅₀ [nm]^{e} | |
|---|---|---|---|---|---|---|---|
| | Sequence | S/AS | Sequence | ID | | Trans- | Free |
| Target^{[a]} | ID | (LN) | (5′-3′)^{[b]} | NO. | Kᵢ[nm]^{d} | fection | uptake |
| mTTR | XIX | AS | VPu•U•aU•aG•aG•cA•ag | 104 | n.d. | 120.62 | ND |
| | | (23) | •aA•cA•cU•gU•u•u•uL96 | | | | |
| Single | XX | AS) | VPu•U•au•aG•aG•C•aa•ga• | 105 | n.d. | 65.11 | ND |
| Sranded | | (23 | A•cA•cu•gu•u•u•uL96 | | | | |

^{[a]}siRNA targeting mRNA encoding mouse transthyretin (mTTR
^{[b]}S and AS indicate sense and antisense strands Italicized upper case and normal lower case letters indicate 2′-deoxy-2′-fluoro, and 2′-O-methyl sugar modifications, respectively, to adenosine (A), cytidine (C), guanosine (G) and uridine (U); and dT indicate deoxythymidine;
•Indicate phosphorothioate (PS) linkage.
^{d}Binding affinity to ASGPR (on mouse primary hepatocytes, fluorescent based assay).
^{e}Half maximal inhibitory concentration (IC₅₀) for in vitro gene silencing under transfection (Lipofectamine RNAiMAX) or free uptake conditions in primary mouse hepatocytes (LN) = length of nucleotide.

TABLE 8
m/r TTR targeting duplexes

| | | | SEQ | | SEQ |
|---|---|---|---|---|---|
| Du- | | | ID | Antisense | ID |
| plex | Id # | SensestrandoligoSeq | NO. | strandoligoSeq | NO. |
| I | AD- | AfsasCfaGfuGfuUfCfUfuGfcUf | 106 | usUfsaUfaGfaGfcAfagaAfcAfc | 124 |
| | 57727 | cUfaUfaAfL96 | | UfgUfususu | |
| II | AD- | AfsasCfaGfuGfuUfCfUfuGfcUf | 107 | usUfsaUfaGfaGfcAfagaAfcAfc | 125 |
| | 77197 | cUfaUfsasAf | | UfgUfususuL96 | |
| VII | AD- | AfsasCfaGfuGfuUfCfUfuGfcUf | 108 | usUfsaUfaGfaGfcAfagaAfcAfc | 126 |
| | 80301 | cUfaUfsasAf | | UfgUfuuuL96 | |
| VIII | AD- | AfsasCfaGfuGfuUfCfUfuGfcUf | 109 | usUfsaUfaGfaGfcAfagaAfcAfc | 127 |
| | 155481 | cUfaUfsasAfL96 | | UfgUfususu | |
| IX | AD- | AfsasCfaGfuGfuUfCfUfuGfcUf | 110 | usUfsaUfaGfaGfcAfagaAfcAfc | 128 |
| | 155482 | cUfaUfsasAf | | UfgUfudTdTL96 | |
| X | AD- | AfsasCfaGfuGfuUfCfUfuGfcUf | 111 | usUfsaUfaGfaGfcAfagaAfcAfc | 129 |
| | 155483 | cUfaUfsasAf | | UfgUfusdTsdTL96 | |
| XI | AD- | asAfsaCfaGfuGfuUfCfUfuGfcU | 112 | usUfsaUfaGfaGfcAfagaAfcAfc | 130 |
| | 157476 | fcUfaUfsasAf | | UfgUfsusuL96 | |
| XII | AD- | asAfsaCfaGfuGfuUfCfUfuGfcU | 113 | usUfsaUfaGfaGfcAfagaAfcAfc | 131 |
| | 157477 | fcUfaUfsasAf | | UfgUfususuL96 | |
| XIII | AD- | AfsasCfaGfuGfuUfCfUfuGfcUf | 114 | usUfsaUfaGfaGfcAfagaAfcAfc | 132 |
| | 192409 | cUfaUfsasAf | | UfgsUfsuL96 | |
| XIV | AD- | AfsasCfaGfuGfuUfCfUfuGfcUf | 115 | usUfsaUfaGfaGfcAfagaAfcAfc | 133 |
| | 192410 | cUfaUfsasAf | | UfgUfsusuL96 | |
| XV | AD- | AfsasCfaGfuGfuUfCfUfuGfcUf | 116 | usUfsaUfaGfaGfcAfagaAfcAfc | 134 |
| | 77196 | cUfaUfsasAf | | UfgUfususudTdTL96 | |
| XVI | AD- | AfsasCfaGfuGfuUfCfUfuGfcUf | 117 | usUfsaUfaGfaGfcAfagaAfcAfc | 135 |
| | 80302 | cUfaUfsasAf | | UfgUfuuusdTsdTL96 | |
| III | AD- | UfsgsAfcAfaAfaUfAfAfcUfcAf | 118 | usUfsaUfaGfuGfaGfuuaUfuUfu | 136 |
| | 58641 | cUfaUfaAfL96 | | GfuCfasasu | |
| IV | AD- | UfsgsAfcAfaAfaUfAfAfcUfcAf | 119 | usUfsaUfaGfuGfaGfuuaUfuUfu | 137 |
| | 81865 | cUfaUfsasAf | | GfuCfasasuL96 | |
| XVII | AD- | UfsgsAfcAfaAfaUfAfAfcUfcAf | 120 | usUfsaUfaGfuGfaGfuuaUfuUfu | 138 |
| | 81866 | cUfaUfsasAf | | GfuCfaauL96 | |
| VI | AD- | gsasaacuCfaAfUfAfaagugcuus | 121 | usAfsaagCfacuuuauUfgAfguuu | 139 |
| | 81867 | usa | | csusgL96 | |
| XVIII | AD- | gsasaacuCfaAfUfAfaagugcuus | 122 | usAfsaagCfacuuuauUfgAfguuu | 140 |
| | 81868 | usa | | cugL96 | |
| V | AD- | gsasaacuCfaAfUfAfaagugcuuu | 123 | usAfsaagCfacuuuauUfgAfguuu | 141 |
| | 74210 | aL96 | | csusg | |
| XIX | | (n/a, single stranded) | | VPusUfsaUfsaGfsaGfscAfsags | 142 |
| | | | | aAfscAfscUfsgUfsususuL96 | |
| XX | | (n/a, single stranded) | | VPusUfsausaGfsaGfsCfsaasga | 143 |
| | | | | sAfscAfscusgusususuL96 | |

### REFERENCES

[1304] 1. Adams, D.; Gonzalez-Duarte, A.; O'Riordan, W. D.; Yang, C. C.; Ueda, M.; Kristen, A. V.; Tournev, I.; Schmidt, H. H.; Coelho, T.; Berk, J. L.; Lin, K. P.; Vita, G.; Attarian, S.; Plante-Bordeneuve, V.; Mezei, M. M.; Campistol, J. M.; Buades, J.; Brannagan, T. H., III; Kim, B. J.; Oh, J.; Parman, Y.; Sekijima, Y.; Hawkins, P. N.; Solomon, S. D.; Polydefkis, M.; Dyck, P. J.; Gandhi, P. J.; Goyal, S.; Chen, J.; Strahs, A. L.; Nochur, S. V.; Sweetser, M. T.; Garg, P. P.; Vaishnaw, A. K.; Gollob, J. A.; Suhr, O. B., Patisiran, an RNAi therapeutic, for hereditary transthyretin amyloidosis. N. Engl. J. Med. 2018, 379(1), 11-21.
[1305] 2. Khvorova, A., Oligonucleotide Therapeutics—A New Class of Cholesterol-Lowering Drugs. New England Journal of Medicine 2017, 376(1), 4-7.
[1306] 3. Ray, K. K.; Landmesser, U.; Leiter, L. A.; Kallend, D.; Dufour, R.; Karakas, M.; Hall, T.; Troquay, R. P. T.; Turner, T.; Visseren, F. L. J.; Wijngaard, P.; Wright, R. S.; Kastelein, J. J. P., Inclisiran in Patients at High Cardiovascular Risk with Elevated LDL Cholesterol. New England Journal of Medicine 2017, 376(15), 1430-1440.
[1307] 4. Sheridan, C., PCSK9-gene-silencing, cholesterol-lowering drug impresses. Nature Biotechnology 2019, 37(12), 1385-1387.
[1308] 5. Kosmas, C. E.; Estrella, A. M.; Sourlas, A.; Silverio, D.; Hilario, E.; Montan, P. D.; Guzman, E., Inclisiran: a new promising agent in the management of hypercholesterolemia. Diseases 2018, 6(3), 63.
[1309] 6. Liebow, A.; Li, X.; Racie, T.; Hettinger, J.; Bettencourt, B. R.; Najafian, N.; Haslett, P.; Fitzgerald, K.; Holmes, R. P.; Erbe, D.; Querbes, W.; Knight, J., An Investigational RNAi Therapeutic Targeting Glycolate Oxidase Reduces Oxalate Production in Models of Primary Hyperoxaluria. Journal of the American Society of Nephrology 2017, 28(2), 494-503.
[1310] 7. Chan, A.; Liebow, A.; Yasuda, M.; Gan, L.; Racie, T.; Maier, M.; Kuchimanchi, S.; Foster, D.; Milstein, S.; Charisse, K.; Sehgal, A.; Manoharan, M.; Meyers, R.; Fitzgerald, K.; Simon, A.; Desnick, R. J.; Querbes, W., Preclinical Development of a Subcutaneous ALAS1 RNAi Therapeutic for Treatment of Hepatic Porphyrias Using Circulating RNA Quantification. Mol. Ther.--Nucleic Acids 2015, 4(11), e263.
[1311] 8. Severgnini, M.; Sherman, J.; Sehgal, A.; Jayaprakash, N. K.; Aubin, J.; Wang, G.; Zhang, L.; Peng, C. G.; Yucius, K.; Butler, J.; Fitzgerald, K., A rapid two-step method for isolation of functional primary mouse hepatocytes: cell characterization and asialoglycoprotein receptor based assay development. Cytotechnology 2012, 64(2), 187-95.
[1312] 9. Nair, J. K.; Willoughby, J. L.; Chan, A.; Charisse, K.; Alam, M. R.; Wang, Q.; Hoekstra, M.; Kandasamy, P.; Kel'in, A. V.; Milstein, S.; Taneja, N.; O'Shea, J.; Shaikh, S.; Zhang, L.; van der Sluis, R. J.; Jung, M. E.; Akinc, A.; Hutabarat, R.; Kuchimanchi, S.; Fitzgerald, K.; Zimmermann, T.; van Berkel, T. J.; Maier, M. A.; Rajeev, K. G.; Manoharan, M., Multivalent N-acetylgalactosamine-conjugated siRNA localizes in hepatocytes and elicits robust RNAi-mediated gene silencing. J Am Chem Soc 2014, 136(49), 16958-61.
[1313] 10. Elkayam, E.; Parmar, R.; Brown, C. R.; Willoughby, J. L.; Theile, C. S.; Manoharan, M.; Joshua-Tor, L., siRNA carrying an (E)-vinylphosphonate moiety at the 5′ end of the guide strand augments gene silencing by enhanced binding to human Argonaute-2. Nucleic Acids Research 2017, 45(6), 3528-3536.
[1314] 11. Pei, Y.; Hancock, P. J.; Zhang, H.; Bartz, R.; Cherrin, C.; Innocent, N.; Pomerantz, C. J.; Seitzer, J.; Koser, M. L.; Abrams, M. T.; Xu, Y.; Kuklin, N. A.; Burke, P. A.; Sachs, A. B.; Sepp-Lorenzino, L.; Barnett, S. F., Quantitative evaluation of siRNA delivery in vivo. RNA 2010, 16(12), 2553-2563.
[1315] 12. Chen, C.; Ridzon, D. A.; Broomer, A. J.; Zhou, Z.; Lee, D. H.; Nguyen, J. T.; Barbisin, M.; Xu, N. L.; Mahuvakar, V. R.; Andersen, M. R.; Lao, K. Q.; Livak, K. J.; Guegler, K. J., Real-time quantification of microRNAs by stem-loop RT-PCR. Nucleic Acids Research 2005, 33 (20), e179-e179.
[1316] 13. Nair, J. K.; Attarwala, H.; Sehgal, A.; Wang, Q.; Aluri, K.; Zhang, X.; Gao, M.; Liu, J.; Indrakanti, R.; Schofield, S.; Kretschmer, P.; Brown, C. R.; Gupta, S.; Willoughby, J. L. S.; Boshar, J. A.; Jadhav, V.; Charisse, K.; Zimmermann, T.; Fitzgerald, K.; Manoharan, M.; Rajeev, K. G.; Akinc, A.; Hutabarat, R.; Maier, M. A., Impact of enhanced metabolic stability on pharmacokinetics and pharmacodynamics of GalNAc-siRNA conjugates. Nucleic Acids Research 2017, gkx818-gkx818.
[1317] 14. Chan, A.; Liebow, A.; Yasuda, M.; Gan, L.; Racie, T.; Maier, M.; Kuchimanchi, S.; Foster, D.; Milstein, S.; Charisse, K.; Sehgal, A.; Manoharan, M.; Meyers, R.; Fitzgerald, K.; Simon, A.; Desnick, R. J.; Querbes, W., Preclinical Development of a Subcutaneous ALAS1 RNAi Therapeutic for Treatment of Hepatic Porphyrias Using Circulating RNA Quantification. Molecular Therapy-Nucleic Acids 2015, 4 (Supplement C), e263.
[1318] 15. Cheng, A.; Li, M.; Liang, Y.; Wang, Y.; Wong, L.; Chen, C.; Vlassov, A. V.; Magdaleno, S., Stem-loop RT-PCR quantification of siRNAs in vitro and in vivo. Oligonucleotides 2009, 19 (2), 203-8.

### ADDITIONAL REFERENCES

[1319] 1. Manoharan, M. (2004)RNA interference and chemically modified small interfering RNAs. Curr. Opin. in Chem.l Biol., 8, 570-579.
[1320] 2. Shen, X. and Corey, D. R. (2017)Chemistry, mechanism and clinical status of antisense oligonucleotides and duplex RNAs. Nucleic Acids Res., 46, 1584-1600.
[1321] 3. Setten, R. L., Rossi, J. J. and Han, S.-P. (2019) The current state and future directions of RNAi-based therapeutics. Nat. Rev. Drug Discov., 18, 421-446.
[1322] 4. Bumcrot, D., Manoharan, M., Koteliansky, V. and Sah, D. W. (2006)RNAi therapeutics: a potential new class of pharmaceutical drugs. Nat. Chem. Biol., 2, 711-719.
[1323] 5. T. C. Roberts, R. Langer and M. J. A. Wood, Nat. Rev. Drug. Discov., 2020, 19, 673. Deleavey, G. F., Watts, J. K. and Damha, M. J. (2009)Chemical modification of siRNA. Curr. Protoc. in Nucleic Acid Chem., 39, 16.13.11-16.13.22.
[1324] 6. Akinc, A., Maier, M. A., Manoharan, M., Fitzgerald, K., Jayaraman, M., Barros, S., Ansell, S., Du, X., Hope, M. J., Madden, T. D., Mui, B. L., Semple, S. C., Tam, Y. K., Ciufolini, M., Witzigmann, D., Kulkarni, J. A., van der Meel, R. and Cullis, P. R. (2019) The Onpattro story and the clinical translation of nanomedicines containing nucleic acid-based drugs. Nat. Nanotechnol., 14, 1084-1087.
[1325] 7. Balwani, M., Sardh, E., Ventura, P., Peiró, P. A., Rees, D. C., Stölzel, U., Bissell, D. M., Bonkovsky, H. L., Windyga, J., Anderson, K. E., Parker, C., Silver, S. M., Keel, S. B., Wang, J.-D., Stein, P. E., Harper, P., Vassiliou, D., Wang, B., Phillips, J., Ivanova, A., Langendonk, J. G., Ph.D., Kauppinen, R., Minder, E., Horie, Y., Penz, C., Chen, J., Liu, S., Ko, J. J., Sweetser, M. T., Garg, P., Vaishnaw, A., Kim, J. B., Simon, A. R. and Gouya, L. (2020) Phase 3 trial of RNAi therapeutic Givosiran for acute intermittent porphyria. N. Engl. J. Med., 382, 2289-2301.
[1326] 8. Chan, A., Liebow, A., Yasuda, M., Gan, L., Racie, T., Maier, M., Kuchimanchi, S., Foster, D., Milstein, S., Charisse, K., Sehgal, A., Manoharan, M., Meyer, R., Fitzgerald, K., Simon, A., Desnick, R. J. and Querbes, W. (2015) Preclinical development of a subcutaneous ALAS1 RNAi therapeutic for treatment of hepatic porphyrias using circulating RNA quantification. Mol. Ther.-Nucleic Acids, 4, e263.
[1327] 9. Liebow, A., Li, X., Racie, T., Hettinger, J., Bettencourt, B. R., Najafian, N., Haslett, P., Fitzgerald, K., Holmes, R. P., Erbe, D., Querbes, W. and Knight, J. (2017) An investigational RNAi therapeutic targeting glycolate oxidase reduces oxalate production in models of primary hyperoxaluria. J. Am. Soc. Nephrol., 28, 494-503.
[1328] 10. Raal, F. J., Kallend, D., Ray, K. K., Turner, T., Koenig, W., Wright, R. S., Wijngaard, P. L. J., Curcio, D., Jaros, M. J., Leiter, L. A. and Kastelein, J. J. P. (2020) Inclisiran for the treatment of heterozygous familial hypercholesterolemia. N. Engl. J. Med., 382, 1520-1530.
[1329] 11. Ray, K. K., Wright, R. S., Kallend, D., Koenig, W., Leiter, L. A., Raal, F. J., Bisch, J. A., Richardson, T., Jaros, M., Wijngaard, P. L. J. and Kastelein, J. J. P. (2020) Two phase 3 trials of inclisiran in patients with elevated LDL cholesterol. N. Engl. J. Med., 382, 1507-1519.
[1330] 12. Fitzgerald, K., White, S., Borodovsky, A., Bettencourt, B. R., Strahs, A., Clausen, V., Wijngaard, P., Horton, J. D., Taubel, J., Brooks, A., Fernando, C., Kauffman, R. S., Kallend, D., Vaishnaw, A. and Simon, A. (2016) A highly durable RNAi therapeutic inhibitor of PCSK9. N. Engl. J. Med., 376, 41-51.
[1331] 13. Allerson, C. R., Sioufi, N., Jarres, R., Prakash, T. P., Naik, N., Berdeja, A., Wanders, L., Griffey, R. H., Swayze, E. E. and Bhat, B. (2005) Fully 2′-modified oligonucleotide duplexes with improved in vitro potency and stability compared to unmodified small interfering RNA. J. Med. Chem., 48, 901-904.
[1332] 14. Manoharan, M., Akinc, A., Pandey, R. K., Qin, J., Hadwiger, P., John, M., Mills, K., Charisse, K., Maier, M. A., Nechev, L., Greene, E. M., Pallan, P. S., Rozners, E., Rajeev, K. G. and Egli, M. (2011) Unique gene-silencing and structural properties of 2′-fluoro-modified siRNAs. Angew. Chem. Int. Ed. Engl., 50, 2284-2288.
[1333] 15. Pallan, P. S., Greene, E. M., Jicman, P. A., Pandey, R. K., Manoharan, M., Rozners, E. and Egli, M. (2011) Unexpected origins of the enhanced pairing affinity of 2′-fluoro-modified RNA. Nucleic Acids Res., 39, 3482-3495.
[1334] 16. Patra, A., Paolillo, M., Charisse, K., Manoharan, M., Rozners, E. and Egli, M. (2012)₂′-Fluoro RNA shows increased Watson-Crick H-bonding strength and stacking relative to RNA: evidence from NMR and thermodynamic data. Angew. Chem. Int. Ed. Engl., 51, 11863-11866.
[1335] 17. Egli, M. and Manoharan, M. (2019)Re-engineering RNA molecules into therapeutic agents. Acc. Chem. Res., 52, 1036-1047.
[1336] 18. Nair, J. K., Willoughby, J. L. S., Chan, A., Charisse, K., Alam, M. R., Wang, Q., Hoekstra, M., Kandasamy, P., Kel'in, A. V., Milstein, S., Taneja, N., O'Shea, J., Shaikh, S., Zhang, L., van der Sluis, R. J., Jung, M. E., Akinc, A., Hutabarat, R., Kuchimanchi, S., Fitzgerald, K., Zimmermann, T., van Berkel, T. J. C, Maier, M. A., Rajeev, K. G. and Manoharan, M. (2014) Multivalent N-acetylgalactosamine-conjugated siRNA localizes in hepatocytes and elicits robust RNAi-mediated gene silencing. J. Am. Chem. Soc., 136, 16958-16961.

### Example 2: Building Efficient RISC Blockers: Rational Optimization of the 5′ End of the siRNA Sense Strand to Ensure Strand Bias

[1337] To ensure specificity of small interfering RNAs (siRNAs), the antisense strand must be selected by the RNA induced silencing complex (RISC). To ensure strand bias, 5′-modified nucleotide building blocks were designed and synthesized to block interaction of RISC with the sense strand of the siRNA duplex. The modifications were designed based on the known structure of the MID domain of the enzyme Argonaute2. siRNAs with modified sense strands were evaluated in mice and in vitro. Our data show that the 5′-morpholino modification is an effective RISC blocker that will be useful for off-target mitigation.

[1338] Small interfering RNAs (siRNAs) are 21-23-nucleotide long duplexes that engage with the RNA-induced silencing complex (RISC) to regulate gene expression through the RNA interference (RNAi) pathway. RISC separates the antisense strand from the sense strand of the duplex and retains the antisense strand and then binds and cleaves target mRNA.¹⁻³ Strand selection is a critical step in siRNA-mediated gene silencing, as loading of the sense strand into the RISC can lead to off-target effects through silencing of mRNAs complementary to this strand.^{4,5} One driver of strand selection is thermodynamics: The strand with its 5′-terminus at the thermodynamically less stable end of the siRNA duplex is selected as the antisense strand.⁶ Moreover, 5′-end phosphorylation is a requirement for efficient loading into the RISC.^{7, 8, 9} Therefore, the presence of a monophosphate group or phosphate analog at the 5′ end can ensure selection of the desired strand.¹⁰⁻¹³ The presence of a group that blocks 5′-end phosphorylation of the sense strand also reduces off-target effects.¹⁸

[1339] We previously reported synthesis of a 5′-morpholino modified nucleoside (Mo1, FIG. 33) and demonstrated that its presence at the 5′-end of the sense strand improves antisense strand selection more effectively than 5′-O-methyl or unlocked nucleic acid.¹⁴ When the interaction of an siRNA with a Mol-modified strand with the MID domain of Ago2 was modeled, there was not a snug fit. We reasoned that extension of the morpholino group at the point of attachment to the nucleoside 5′-end might result in a better RISC antagonist. Thus, an extended morpholino, Mo2, was designed and synthesized (FIG. 33). We also synthesized two additional potential antagonists, piperidine (Pip) and Mo3 (FIG. 33) taking advantage of our recent demonstration that the 5′-OH of nucleosides can be bis-functionalized with aminooxy click chemistry.¹⁵

Mo2 was synthesized as shown in Scheme 1.

[chemical structure]

[1340] Commercially available nucleoside 1¹³ was oxidized to the aldehyde 2¹³ following the literature procedure.¹⁶ A Wittig reaction on compound 2 produced compound 3 in good yield. Hydroboration of 3 with 9-borabicyclo[3.3.1]nonane followed by oxidation afforded compound 4. This step was optimized after several trial reactions (Table 9). The primary hydroxyl group of 4 was then tosylated to obtain compound 5. Nucleophilic displacement of the tosyl group by neat morpholine under heating condition produced 6. Deprotection of the tert-butyldimethylsilyl (TBS) group using tetrabutylammonium fluoride (TBAF) afforded compound 7, which was then converted to phosphoramidite 8 by phosphitylation with 2-cyanoethyl-N,N-diisopropylchlorophosphoramidite in the presence of diisopropylethylamine (DIPEA) and N-methylimidazole (NMI).

TABLE 9
Optimization of conditions for compound 4

[chemical structure]

| Entry | Conditions^{a} | Product(s) (based on LCMS) |
|---|---|---|
| 1 | 9-BBN, sodium perborate tetrahydrate, THF, MeOH, H₂O, 0- | 4 (7%), |
| | 25° C., 17 hr | 3 (70%) |
| 2 | 9-BBN, sodium perborate tetrahydrate, THF, MeOH, H₂O, 0- | 4 (14%), |
| | 25° C., 17 hr | 3 (69%) |
| 3 | 9-BBN, sodium perborate tetrahydrate, THF, MeOH, H₂O, | 4 (32%), |
| | 30° C., 17 hr | 3 (21%) |
| 4 | BH₃.THF, sodium perborate tetrahydrate, THF, MeOH, H₂O, | 85% unidentified byproduct |
| | 0-25° C., 3 hr | |
| 5 | 9-BBN, sodium perborate tetrahydrate, THF, MeOH, H₂O, | 4 (43%) |
| | 40° C., 3 hr | |
| 6 | 9-BBN,sodium perborate tetrahydrate, THF, MeOH, H₂O, | 4 (75%) |
| | 0º C.-rt, 50 hr | |

^{a}Entry 5 is the optimized condition during large scale synthesis of 4

[1341] Pip and Mo3 building blocks were synthesized as shown in Scheme 2.

[chemical structure]

[1342] To synthesize the Pip and Mo3 building blocks (Scheme 2), compound 9 was synthesized following the recently reported procedure with an aminooxy (—ONH₂) group at the 5′-end of nucleoside.¹⁵ Reductive amination of 9 with glutaraldehyde resulted in compound 10 with a six-membered heterocyclic ring comprised of the aminooxy nitrogen atom. Removal of the TBS protecting group afforded compound 12. Phosphitylation of 12 with 2-cyanoethyl-N,N-diisopropylchlorophosphoramidite produced phosphoramidite 14. Similarly, reaction of 2-(2-oxoethoxy) acetaldehyde¹⁷ with compound 9 under reductive amination conditions produced 11, which, upon deprotection of the silyl group with TBAF, resulted in compound 13. Compound 13 was phosphityated with 2-cyanoethyl-N,N,N′,N′-tetraisopropylphosphordiamidite and 5-(ethylthio)-1H-tetrazole to afford the phosphoramidite 15 in moderate yield.

[1343] The modified morpholino building blocks 8, 14 and 15 were incorporated at the 5′-ends of oligonucleotides using standard oligonucleotide synthesis conditions. These building blocks were used to synthesize both sense and antisense strands of siRNAs targeting Apob (Table 11). In the parent siRNA, the 5′-terminal nucleotide is 2′-OMe-U. We first evaluated silencing of Apob expression in mice by siRNA with sense strands modified with Mol, Mo2, Pip and Mo3 (duplexes I, III, IV, and V respectively, Table 10). Mice were treated subcutaneously with 3 mg kg⁻¹ of siRNA, and circulating Apob protein was quantified using an ELISA assay. As previously observed,¹⁸ we found that siRNA activity was improved compared to the parent compound when the sense strand was conjugated with Mol (FIG. 34). The duplexes with sense strands modified with new morpholino modifications Mo2, Pip, and Mo3 had better activity than the siRNA with the Mo1 modification (FIG. 34).

TABLE 10
Exemplary siRNA duplexes

| | Sense strand (upper) and | SEQ |
|---|---|---|
| Du- | antisense strand | ID |
| plex | (lower)ª (5′-3′) | NO. |
| I | Mo1•g•UgAcAaAUAuGgGcAuCaAL | 144 |
| | u•U•gAuGcCcAuauUuGuCaCa•a•a | 145 |
| II | u•g•UgAcAaAUAuGgGcAuCaAL | 146 |
| | Mo1•U•gAuGcCcAuauUuGuCaCa•a•a | 147 |
| III | Mo2•g•UgAcAaAUAuGgGcAuCaAL | 148 |
| | u•U•gAuGcCcAuauUuGuCaCa•a•a | 149 |
| IV | Pip•g•UgAcAaAUAuGgGcAuCaAL | 150 |
| | u•U•gAuGcCcAuauUuGuCaCa•a•a | 151 |
| V | Mo3•g•UgAcAaAUAuGgGcAuCaAL | 152 |
| | u•U•gAuGcCcAuauUuGuCaCa•a•a | 153 |
| VI | u•g•UgAcAaAUAuGgGcAuCaAL | 154 |
| | Mo2•UsgAuGcCcAuauUuGuCaCa•a•a | 155 |
| VII | u•g•UgAcAaAUAuGgGcAuCaAL | 156 |
| | Pip•U•gAuGcCcAuauUuGuCaCa•a•a | 157 |
| VIII | u•g•UgAcAaAUAuGgGcAuCaAL | 158 |
| | Mo3•U•gAuGcCcAuauUuGuCaCa•a•a | 159 |

^{a}Chemical modifications are indicated as follows:
•, PS linkage; lower case, 2′-OMe; italicized upper case, 2′-F; L, trivalent-GalNAc respectively. Structures of Mo1, Mo2, Mo3, Pip and L are shown in FIG. 33.

| | |
|---|---|
| “Mo1•” | 5′-deoxy-5′-morpholino-2′-O-methyluridine-3′-phosphorothioate |
| | [chemical structure] |
| “Mo2•” | 5′-deoxy-5′-(N-morpholinylmethyl)-2′-O- |
| | methyluridine-3′-phosphorothioate |
| | [chemical structure] |
| “Mo3•” | 5′-O-(N-morpholinyl)-2′-O-methyluridine-3′-phosphorothioate |
| | [chemical structure] |
| “Pip•” | 5′-O-(N-piperidinyl)-2′-O-methyluridine-3′-phosphorothioate |
| | [chemical structure] |
| “L” | L96 as described below. |

[1344] When placed at the 5′-end of the antisense strand (Table 12), all modifications resulted in loss of activity compared to the parent siRNA (FIG. 35). Consistent with the earlier observations,¹⁴ duplex II, modified with Mo1, was a poorer inhibitor of Apob silencing than the parent duplex. The siRNA modified with Mo2 was a poorer inhibitor than the duplex modified with Mol, and siRNAs modified with Pip and Mo3 were better inhibitors than were those modified with Mol or Mo2. These data are consistent with our hypothesis that these modifications all block 5′ phosphorylation, which is necessary for RISC loading.^{7, 8, 9}

[1345] To evaluate the general utility of these modifications antisense strands of an siRNA targeting TTR were modified with the morpholino/piperidine analogues (Table 11) and the corresponding siRNAs were evaluated in a previously described in vitro luciferase reporter assay with a luciferase reporter plasmid that contains a single binding site for the antisense strand in the 3′ UTR.¹⁸ The siRNA with Mo1 on the antisense strand was 13-fold less potent than the parent strand; the Mo2 modification was superior, resulting in a 30-fold decrease in potency compared to parent (FIG. 36 and Table 13). Activities of siRNAs modified with Pip and Mo3 were similar to that of the parent siRNA (FIG. 36).

[1346] To assess the impact of the modification on the relative binding affinities to Ago2, the parent or morpholino-modified strands were incubated with recombinant human Ago2, and total RNA bound was quantified by stem-loop RT-qPCR. Significantly less oligonucleotide was loaded onto Ago2 when Mo2, Pip, or Mo3 were at the 5′ position of the antisense strand than when the antisense strand was not modified with a morpholino or when the Mo1 modification was present (FIG. 37).

[1347] To rationalize our observations, we modeled complexes between Ago2 and antisense strands containing Mo1, Mo2, Pip, or Mo3 at their 5′-termini using the crystal structure of Ago2 bound to miR-20a (PDB ID 4f3t) as the starting structure.¹⁵ All models were built using UCSF Chimera¹⁹ and energy-minimized with Amber 14 (https://ambermd.org/),²⁰ as we did previously for modeling of the Mo1-modified strand bound to MID.²⁰ Multiple basic side chains are gathered around the 5′-phosphate of the antisense strand inside the Ago2 MID pocket, and interactions of Mo2, Pip, and Mo3 docked to MID are fairly similar to those seen with Mo1 (FIGS. 38A-38E). The Mo2 and Mo3 analogs, which are longer than Mo1, do not adopt a stretched orientation and thus are not inserted deeply into the binding pocket. These modifications are displaced by about 1 Å compared to the parent Mo1. In the energy minimizations, we assigned a +1 positive charge to Mo1 and Pip, but the corresponding nitrogen was neutral in Pip and Mo3. The only H-bond acceptors or donors on the morpholinos are a nitrogen lone pair or an N—H, respectively. The latter interaction is observed in the case of Mo2 with Tyr-529, which acts as an acceptor (FIG. 38F). The ring oxygen Pip, which is a rather weak acceptor, is within H bonding distance of Lys-570 (FIG. 38C). Interactions of the 5′ phosphate with all of the positively charged lysine and arginine residues as well Gln-545 are disrupted by the insertion of the 5′-morpholino modification. Compared to Mo1, the slightly longer Mo2, Pip, and Mo3 modifications have unfavorable steric interactions with these basic side chains. For example, Lys-533 has its NH₃⁺ headgroup turned away and presents a methylene in the direction of the morpholino moieties in complexes with strands with the longer modifications (FIGS. 38A-38E). All of the morpholino groups are electrostatically incompatible with the MID domain binding site (FIGS. 38G-38H). Mo2 incorporated at the 5′-end of the strand appears to be more disruptive than Mo1 as observed experimentally.

[1348] In conclusion, three phosphoramidite building blocks were synthesized to allow incorporation of extended morpholino functional groups at the 5′-position of oligonucleotides. In mice, in a reporter gene assay, and in an assay to monitor loading onto RISC, the Mo2 modification most effectively blocked loading of an siRNA strand of the modifications tested. This extended morpholino modification scan mitigate sense strand-mediated off-target effects²¹ and can be useful for studies of the role of the antisense strand in downstream effects.²² These modifications can also improve resistance to degradation by 5′-exonucleases. When used in sense strands in conjunction with the 5′-phosphate mimic 5′-vinylphosphonate, the Mo2 modification can enhance potency and specificity through multiple mechanisms.

### REFERENCES

[1349] (1) S. M. Elbashir, J. Harborth, W. Lendeckel, A. Yalcin, K. Weber and T. Tuschl, Nature, 2001, 411, 494-498.
[1350] (2) M. Manoharan, Curr. Opin. Chem. Biol., 2004, 8, 570-579.
[1351] (3) D. Bumcrot, M. Manoharan, V. Koteliansky and D. W. Y. Sah, Nat. Chem. Biol., 2006, 2, 711-719.
[1352] (4) N. M. Snead, J. R. Escamilla-Powers, J. J. Rossi and A. P. McCaffrey, Mol. Ther.--Nucleic Acids, 2013, 2, E103.
[1353] (5) N. Vaish, F. Chen, S. Seth, K. Fosnaugh, Y. Liu, R. Adami, T. Brown, Y. Chen, P. Harvie, R. Johns, G. Severson, B. Granger, P. Charmley, M. Houston, M. V. Templin and B. Polisky, Nucleic Acids Res., 2011, 39, 1823-1832.
[1354] (6) D. S. Schwarz, G. Hutvagner, T. Du, Z. Xu, N. Aronin and P. D. Zamore, Cell, 2003, 115, 199-208.
[1355] (7) S. Weitzer and J. Martinez, Nature, 2007, 447, 222-226.
[1356] (8) C.-D. Kuhn and L. Joshua-Tor, Trends Biochem. Sci., 2013, 38, 263-271.
[1357] (9) N. H. Tolia and L. Joshua-Tor, Nature Chem.l Biol., 2007, 3, 36-43.
[1358] (10) E. Elkayam, C.-D. Kuhn, A. Tocilj, A. D. Haase, E. M. Greene, G. J. Hannon and L. Joshua-Tor, Cell, 2012, 150, 100-110.
[1359] (11) N. T. Schirle and I. J. MacRae, Science, 2012, 336, 1037-1040.
[1360] (12) E. Elkayam, R. Parmar, C. R. Brown, J. L. Willoughby, C. S. Theile, M. Manoharan and L. Joshua-Tor, Nucleic Acids Res., 2017, 45, 3528-3536.
[1361] (13) R. G. Parmar, C. R. Brown, S. Matsuda, J. L. S. Willoughby, C. S. Theile, K. Charisse, D. J. Foster, I. Zlatev, V. Jadhav, M. A. Maier, M. Egli, M. Manoharan and K. G. Rajeev, J. Med. Chem., 2018, 61, 734-744.
[1362] (14) P. Kumar, R. G. Parmar, C. R. Brown, J. L. S. Willoughby, D. J. Foster, I. R. Babu, S. Schofield, V. Jadhav, K. Charisse, J. K. Nair, K. G. Rajeev, M. A. Maier, M. Egli and M. Manoharan, Chem. Commun., 2019, 55, 5139-5142.
[1363] (15) D. Datta, S. Mori, M. Madaoui, K. Wassarman, I. Zlatev and M. Manoharan, Org. Lett., 2022, 24, 4496-4501.
[1364] (16) M. J. Fer, P. Doan, T. Prange, S. Calvet-Vitale and C. Gravier-Pelletier, J. Org. Chem., 2014, 79, 7758-7765.
[1365] (17) M. Israel and R. J. Murray, J. Med. Chem., 1982, 25, 24-28.
[1366] (18) D. C. Guenther, S. Mori, S. Matsuda, J. A. Gilbert, S. Hyde, A. Bisbe, Y. Jiang, S. Agarwal, M. M. Janas, K. Charisse and M. Manoharan, J. Am. Chem. Soc., 2022.
[1367] (19) E. F. Pettersen, T. D. Goddard, C. C. Huang, G. S. Couch, D. M. Greenblatt, E. C. Meng and T. E. Ferrin, J. Comput. Chem., 2004, 25, 1605-1612.
[1368] (20) D. A. Case, T. E. Cheatham Iii, T. Darden, H. Gohlke, R. Luo, K. M. Merz Jr, A. Onufriev, C. Simmerling, B. Wang and R. J. Woods, J. Comput. Chem., 2005, 26, 1668-1688.
[1369] (21) V. Kotikam and E. Rozners, Acc. Chem. Res., 2020, 53, 1782-1790.
[1370] (22) M. M. Janas, M. K. Schlegel, C. E. Harbison, V. O. Yilmaz, Y. Jiang, R. Parmar, I. Zlatev, A. Castoreno, H. Xu, S. Shulga-Morskaya, K. G. Rajeev, M. Manoharan, N. D. Keirstead, M. A. Maier and V. Jadhav, Nat. Commun., 2018, 9, 1-10.

### Synthesis of Building Blocks:

[1371] General conditions: Compounds were visualized under UV light (254 nm) or after spraying with the p-anisaldehyde staining solution followed by heating. Flash column chromatography was performed using a Teledyne ISCO Combi Flash system with pre-packed RediSep Teledyne ISCO silica gel cartridges and Prep-Achiral supercritical fluid chromatography (SFC). All moisture-sensitive reactions were carried out under anhydrous conditions using dry glassware, anhydrous solvents, and argon atmosphere. All commercially available reagents and solvents were purchased from Sigma-Aldrich unless otherwise stated and were used as received. ESI-MS spectra were recorded on a Waters QTof Premier instrument using the direct flow injection mode. ¹H NMR spectra were recorded at 300, 400 and 500 MHz. ¹³C NMR spectra were recorded at 75, 101, and 126 MHz. ³¹P NMR spectra were recorded at 162 and 202 MHz. Chemical shifts are given in ppm referenced to the solvent residual peak (DMSO-d₆-¹H: δ at 2.50 ppm and ¹³C δ at 39.5 ppm; CDCl₃-¹H: δ at 7.26 ppm and ¹³C δ at 77.16 ppm). Coupling constants are given in Hertz. Signal splitting patterns are described as singlet(s), doublet (d), triplet (t), septet (sept), broad signal (brs), or multiplet (m)

### Synthesis of (2S,5R)-3-[tert-butyl(dimethyl) silyl]oxy-5-(2,4-dioxopyrimidin-1-yl)-4-methoxy-tetrahydrofuran-2-carbaldehyde (2)

[chemical structure]

[1372] The aldehyde was synthesized following the literature procedure¹. 2-iodoxybenzoic acid (2.82 g, 10.07 mmol) was added to 1 (1.25 g, 3.36 mmol) in anhydrous acetonitrile (30 mL) under argon atmosphere. The mixture was refluxed at 81° C. for 0.75 hr and then cooled. Reaction mixture was filtered through celite bed and solid residue was washed with ethyl acetate (EtOAc) (50 mL). The combined filtrate was evaporated at 30° C. Gummy residue thus obtained, was further co-evaporated with toluene (30 mL) to afford 2 (1.15 g, 93% yield) as an amorphous white solid that was used in the next step without of further purification. The product was stored at −20° C. ¹H NMR (500 MHz, CDCl₃) δ 9.79 (s, 1H), 9.75 (s, 1H), 7.68 (d, J=8.1 Hz, 1H), 5.88-5.72 (m, 2H), 4.55 (d, J=4.5 Hz, 1H), 4.43 (t, J=4.5 Hz, 1H), 3.96 (t, J=4.7 Hz, 1H), 3.47 (s, 3H), 0.93 (s, 9H), 0.14 (d, J=7.7 Hz, 6H) ppm.

### Synthesis of 1-[(2R,5R)-4-[tert-butyl(dimethyl) silyl]oxy-3-methoxy-5-vinyl-tetrahydrofuran-2-yl]pyrimidine-2,4-dione (3)

[chemical structure]

[1373] Compound 3 was obtained following the literature procedure¹. To a well-stirred suspension of methyltriphenylphosphonium bromide (7.08 g, 19.43 mmol) in tetrahydrofuran (THF) (30 mL) was added potassium-tert-butoxide (2.23 g, 19.43 mmol). The bright yellow suspension was stirred at 0° C. for 10 minutes and then for 1 hr. The crude aldehyde 2 (2.4 g, 6.48 mmol) was dissolved in THF (20 mL), transferred into a dropping funnel, and slowly added to the solution of ylide at 0° C. The mixture was vigorously stirred at 0° C. for 10 minutes and the at 22° C. for 16 hr. The mixture was diluted with DCM (30 mL) and organic layer was washed with saturated NH₄Cl solution (30 mL). Organic layer then separated, dried over anhydrous Na₂SO₄, filtered and the filtrate was evaporated to dryness. Crude compound was purified by column chromatography (gradient: 0-50% EtOAc in hexane) to afford 3 (1.93 g, 81% yield) as white foam. ¹H NMR (400 MHz, CDCl₃) δ 9.26 (s, 1H), 7.38 (d, J=8.1 Hz, 1H), 5.90 (ddd, J=17.1, 10.5, 6.5 Hz, 1H), 5.83 (d, J=2.0 Hz, 1H), 5.77 (dd, J=8.1, 1.9 Hz, 1H), 5.45 (dt, J=17.1, 1.3 Hz, 1H), 5.35 (dt, J=10.5, 1.3 Hz, 1H), 4.42 (tt, J=6.5, 1.3 Hz, 1H), 3.91 (dd, J=7.7, 5.0 Hz, 1H), 3.72 (dd, J=5.0, 2.1 Hz, 1H), 3.56 (s, 3H), 0.90 (s, 9H), 0.09 (d, J=7.2 Hz, 6H) ppm. ¹³C (101 MHz, CDCl₃) δ 163.4, 150.0, 139.8, 134.6, 119.3, 102.6, 89.8, 8.1, 83.6, 74.6, 58.8, 25.8, 18.3, −4.5, −4.5 ppm. HRMS calc. for C₁₇H₂₉N₂O₅Si [M+H]⁺ 369.1846, found 369.1846.

### Synthesis of 1-[(2R,5R)-4-[tert-butyl(dimethyl) silyl]oxy-5-(2-hydroxyethyl)-3-methoxy-tetrahydrofuran-2-yl]pyrimidine-2,4-dione (4)

[chemical structure]

[1374] Hydroboration of 3 was done following the literature procedure². To a solution of 3 (2.0 g, 5.43 mmol) in THF (25 mL) was added 9-borabicyclo[3.3.1]nonane (3.97 g, 32.56 mmol, 4.44 mL) at 0° C. The mixture was allowed to warm and stirred at 22° C. for 20 hr. Then the reaction mixture was cooled, and methanol (MeOH) (20 mL) was added dropwise. When the gas evolution ceased, water (30 mL) was added followed by sodium perborate tetrahydrate (20.88 g, 130.26 mmol). Resulting mixture was stirred for 30 hr vigorously at 0° C. and then filtered. Filtrate was washed with EtOAc (50 mL). Organic layer was further washed with brine (40 mL), dried over anhydrous Na₂SO₄, filtered and filtrate was evaporated to dryness. Crude residue thus obtained was purified by column chromatography (gradient: 20-75% EtOAc in hexane) to afford 4 (1.57 g, 75% yield) as white solid. ¹H NMR (600 MHz, DMSO-d₆) δ 11.38 (s, 1H), 7.62 (d, J=8.0 Hz, 1H), 5.77 (d, J=4.5 Hz, 1H), 5.66 (d, J=8.0 Hz, 1H), 4.56 (t, J=5.0 Hz, 1H), 4.12 (t, J=5.2 Hz, 1H), 3.88 (dt, J=7.0, 4.4 Hz, 2H), 3.56-3.42 (m, 2H), 3.32 (s, 3H), 1.80 (dtd, J=14.3, 7.4, 4.6 Hz, 1H), 1.71 (ddt, J=14.0, 8.0, 5.5 Hz, 1H), 0.88 (s, 9H), 0.09 (d, J=3.6 Hz, 6H) ppm. ¹³C NMR (151 MHz, DMSO-d₆) δ 163.1, 150.4, 141.0, 102.2, 87.1, 81.5, 80.7, 73.4, 57.5, 57.4, 35.9, 25.7, 17.8, −4.7, −4.9 ppm. HRMS calc. for C₁₇H₃₀N₂O₆SiNa [M+Na]⁺ 409.1771, found 409.1767.

### Synthesis of 2-[(2R,5R)-3-[tert-butyl(dimethyl) silyl]oxy-5-(2,4-dioxopyrimidin-1-yl)-4-methoxy-tetrahydrofuran-2-yl]ethyl-4-methylbenzenesulfonate (5)

[chemical structure]

[1375] To a clear solution of 4 (1.00 g, 2.59 mmol) in dry dichloromethane (DCM) (30 mL) was added 4-(dimethylamino)pyridine (638.55 mg, 5.17 mmol) and reaction mixture was cooled to 0° C. To the resulting solution, p-toluenesulfonyl chloride (747.36 mg, 3.88 mmol) was added in single portion and reaction mixture was stirred for 12 hr at 22° C. Reaction mixture was diluted with DCM (20 mL), washed with NaHCO₃ solution (30 mL) and organic layer was separated. DCM layer was dried over anhydrous Na₂SO₄, filtered and filtrated was evaporated to dryness. The crude mass thus obtained, was purified by column chromatography (gradient: 0-60% EtOAc in hexane) to afford 5 (0.92 g, 66% yield) as white solid. ¹H NMR (600 MHz, CDCl₃) δ 8.61 (s, 1H), 7.81-7.76 (m, 2H), 7.37-7.32 (m, 2H), 7.23 (d, J=8.1 Hz, 1H), 5.76 (dd, J=8.1, 1.8 Hz, 1H), 5.64 (d, J=2.6 Hz, 1H), 4.23 (ddd, J=10.1, 7.1, 5.3 Hz, 1H), 4.13 (ddd, J=10.1, 7.7, 6.4 Hz, 1H), 3.94 (ddd, J=9.4, 7.3, 3.3 Hz, 1H), 3.86 (dd, J=7.3, 5.3 Hz, 1H), 3.73 (dd, J=5.3, 2.6 Hz, 1H), 3.48 (s, 3H), 2.45 (s, 3H), 2.14 (dtd, J=14.6, 7.4, 3.4 Hz, 1H), 1.90 (dddd, J=14.5, 9.4, 6.5, 5.4 Hz, 1H), 0.89 (s, 9H), 0.09 (s, 3H), 0.07 (s, 3H) ppm. ¹³C NMR (151 MHz, CDCl₃) δ 162.9, 149.7, 145.1, 140.3, 132.9, 130.0, 128.1, 102.8, 90.4, 83.0, 79.5, 74.4, 67.0, 58.6, 32.5, 25.8, 21.8, 18.2, −4.4, −4.7 ppm. HRMS calc. for C₂₄H₃₇N₂O₈SSi [M+H]⁺ 541.2040, found 541.2045.

### Synthesis of 1-[(2R,5R)-4-[tert-butyl(dimethyl) silyl]oxy-3-methoxy-5-(2-morpholinoethyl)tetrahydrofuran-2-yl]pyrimidine-2,4-dione (6)

[chemical structure]

[1376] Morpholine (4 mL) was added to 5 (0.5 g, 0.924 mmol) and the clear solution was heated at 70° C. for 8 hr. All the volatile matters were evaporated, and the residue was purified by column chromatography (gradient: 0-5% MeOH in DCM) to afford 6 (0.35 g, 83% yield) as hygroscopic solid. ¹H NMR (500 MHz, CDCl₃) δ 9.05 (s, 1H), 7.33 (d, J=8.1 Hz, 1H), 5.78 (d, J=2.4 Hz, 1H), 5.76 (d, J=8.1 Hz, 1H), 4.03 (ddd, J=9.0, 7.4, 3.8 Hz, 1H), 3.84 (dd, J=7.4, 5.2 Hz, 1H), 3.75-3.63 (m, 5H), 3.52 (s, 3H), 2.67-2.34 (m, 6H), 2.05-1.88 (m, 1H), 1.79-1.64 (m, 1H), 0.91 (s, 9H), 0.10 (d, J=5.0 Hz, 6H) ppm. ¹³C NMR (126 MHz, CDCl₃) δ 163.2, 149.9, 139.9, 102.6, 89.6, 83.6, 81.5, 74.7, 67.0, 58.5, 55.4, 53.8, 30.4, 25.8, 18.3, −4.3, −4.6 ppm. HRMS calc. for C₂₁H₃₈N₃O₆Si [M+H]⁺456.2530, found 456.2529.

### Synthesis of 1-[(2R,5R)-4-hydroxy-3-methoxy-5-(2-morpholinoethyl)tetrahydrofuran-2-yl]pyrimidine-2,4-dione (7)

[chemical structure]

[1377] To a clear solution of 6 (0.6 g, 1.32 mmol) in THF (15 mL) at 22° C., tetrabutylammonium fluoride, 1M in THF (1.71 mmol, 1.71 mL) was added slowly in single portion and then stirred for 3 hrs. All the volatile matters were removed under high vacuum pump and the residue thus obtained was purified by column chromatography (gradient: 0-10% MeOH in DCM) to afford 7 (0.37 g, 82% yield) as white solid. ¹H NMR (500 MHz, DMSO-d₆) δ 11.50-11.08 (m, 1H), 7.59 (d, J=8.1 Hz, 1H), 5.77 (d, J=4.3 Hz, 1H), 5.65 (dd, J=8.1, 1.9 Hz, 1H), 5.37-5.18 (m, 1H), 3.90 (s, 1H), 3.84 (dd, J=5.3, 4.3 Hz, 1H), 3.79 (dt, J=8.0, 5.4 Hz, 1H), 3.57 (t, J=4.7 Hz, 4H), 3.36 (s, 3H), 2.40-2.26 (m, 6H), 1.87 (dtd, J=13.1, 7.8, 5.2 Hz, 1H), 1.71 (dtd, J=13.5, 7.7, 5.5 Hz, 1H) ppm. ¹³C NMR (126 MHz, DMSO-d₆) δ 163.0, 150.4, 140.8, 102.1, 87.0, 82.0, 81.7, 72.1, 66.1, 57.6, 54.6, 53.2, 29.7 ppm. HRMS calc. for C₁₅H₂₄N₃O₆ [M+H]⁺ 342.1665, found 342.1660.

### Synthesis of 3-[(diisopropylamino)-[(2R,5R)-5-(2,4-dioxopyrimidin-1-yl)-4-methoxy-2-(2-morpholinoethyl)tetrahydrofuran-3-yl]oxy-phosphanyl]propanenitrile (8)

[chemical structure]

[1378] To a clear solution of 7 (0.34 g, 1.0 mmol) in DCM (20 mL) was added DIPEA (650.13 mg, 4.98 mmol, 0.88 mL) and N-methylimidazole (123.90 mg, 1.49 mmol, 0.12 mL) in single portions. To the resulting mixture was added 2-cyanoethyl-N,N-diisopropylchlorophosphoramidite (248.15 mg, 996.02 μmol, 0.23 m μL) at 22° C. and stirred for 1 hr. After 1 hr when TLC showed completion of reaction and reaction mixture was diluted with DCM (20 mL) and quenched by adding NaHCO₃ solution (20 mL). Organic layer was separated, dried over anhydrous Na₂SO₄, filtered and filtrate was evaporated to dryness. Crude material was triturated with 1:1 hexane in ether. Precipitate thus obtained was purified by column chromatography (gradient: 0-3% MeOH in DCM containing 3% TEA) to afford 8 (0.36 g, 69% yield) as yellowish white hygroscopic foam. ¹H NMR (400 MHz, CD₃CN) δ 8.84 (s, 1H), 7.40 (dd, J=8.1, 1.0 Hz, 1H), 7.14-6.73 (m, 1H), 5.83 (dd, J=4.5, 1.1 Hz, 1H), 5.63 (d, J=8.1 Hz, 1H), 4.29-3.97 (m, 2H), 3.91-3.75 (m, 2H), 3.69-3.55 (m, 6H), 3.43 (d, J=14.2 Hz, 3H), 2.83-2.60 (m, 2H), 2.49-2.26 (m, 4H), 1.94 (dt, J=4.9, 2.5 Hz, 1H), 1.76 (ddd, J=9.9, 6.3, 2.2 Hz, 1H), 1.29-0.97 (m, 13H) ppm. ¹³C NMR (126 MHz, CD₃CN) δ 164.1, 151.5, 151.5, 141.1, 138.9, 129.5, 121.3, 119.6, 103.2, 103.1, 88.9, 88.5, 83.2, 83.2, 82.8, 82.7, 82.4, 82.3, 82.0, 81.9, 75.3, 75.2, 75.1, 74.9, 74.5, 67.5, 67.5, 59.8, 59.6, 59.2, 59.0, 58.9, 58.8, 58.7, 58.7, 58.0, 55.6, 54.6, 54.6, 47.3, 46.6, 46.4, 46.3, 46.0, 46.0, 45.6, 44.2, 44.1, 44.1, 44.0, 33.6, 30.9, 25.0, 24.9, 24.9, 24.9, 23.6, 23.2, 23.2, 23.1, 23.1, 22.6, 21.1, 21.0, 21.0, 20.4, 20.4 ppm. ³¹P NMR (202 MHz, CD₃CN) δ 150.84, 150.78 ppm. HRMS calc. for C₂₄H₄₁N₅O₇P [M+H]⁺ 542.2744, found 542.2744.

### Synthesis of 1-[(2R,5R)-4-[tert-butyl(dimethyl) silyl]oxy-3-methoxy-5-(1-piperidyloxymethyl)tetrahydrofuran-2-yl]pyrimidine-2,4-dione (10)

[chemical structure]

[1379] To a clear solution of 9 (0.4 g, 1.03 mmol) in acetic acid (5 mL) and DCM (10 mL), was added glutaraldehyde (0.1 g, 1.03 mmol). To the resulting mixture, sodium cyanoborohydride (0.74 g, 11.56 mmol) was added in portions at 15° C. The reaction mixture was further diluted with DCM (70 mL) and stirred for 8 hr. Volatile matters were removed under high vacuum and the residue thus obtained, was diluted with DCM (50 mL), and washed with water (3×30 mL). Organic layer was separated, dried over anhydrous Na₂SO₄, filtered and filtrate was evaporated to dryness. The crude compound thus obtained was purified by column chromatography to afford 10 (0.32 g, 68.0% yield). ¹H NMR (400 MHz, CDCl₃) δ 9.18 (s, 1H), 8.07 (d, J=8.2 Hz, 1H), 5.88 (d, J=1.9 Hz, 1H), 5.69 (dd, J=8.1, 2.1 Hz, 1H), 4.36-3.96 (m, 3H), 3.97-3.72 (m, 1H), 3.61 (dd, J=4.7, 1.9 Hz, 1H), 3.54 (s, 3H), 3.41-3.24 (m, 2H), 2.36 (s, 2H), 1.74 (s, 2H), 1.56 (d, J=18.3 Hz, 3H), 1.24-1.11 (m, 1H), 0.90 (s, 9H), 0.09 (d, J=3.4 Hz, 6H) ppm. ¹³C NMR (126 MHz, CDCl₃) δ 163.5, 150.2, 140.5, 101.7, 88.1, 84.2, 82.5, 69.4, 68.7, 58.5, 56.9, 25.8, 25.5, 23.5, 18.3, −4.5, −4.7 ppm. HRMS calc. for C₂₁H₃₈N₃O6Si [M+H]⁺ 456.2530, found 456.2520.

### Synthesis of 1-[(2R,5R)-4-[tert-butyl(dimethyl) silyl]oxy-3-methoxy-5-(morpholinooxymethyl)tetrahydrofuran-2-yl]pyrimidine-2,4-dione (11)

[chemical structure]

[1380] To a clear solution of 9 (2.4 g, 6.19 mmol) in acetic acid (20 mL) was added 2-(2-oxoethoxy) acetaldehyde³ (0.63 g, 6.19 mmol) in followed by sodium cyanoborohydride (4.13 g, 64.4 mmol) in portions and stirred at 15° C. for 12 hr. Diluted the mixture with DCM (50 mL) and organic layer was washed with water (2×30 mL). DCM layer dried over anhydrous Na₂SO₄, filtered and the filtrate was evaporated to dryness. The crude residue was purified by column chromatography to afford 11 (0.88 g, 31% yield) as white solid. ¹H NMR (500 MHz, CDCl₃) δ 8.50 (s, 1H), 7.93 (d, J=8.2 Hz, 1H), 5.86 (d, J=2.0 Hz, 1H), 5.70 (dd, J=8.2, 2.0 Hz, 1H), 4.23-4.06 (m, 3H), 3.92 (dd, J=11.9, 3.0 Hz, 3H), 3.67-3.57 (m, 3H), 3.55 (s, 3H), 3.23 (dd, J=28.2, 10.2 Hz, 2H), 2.65 (q, J=10.1 Hz, 2H), 0.91 (s, 9H), 0.10 (d, J=5.8 Hz, 6H) ppm. ¹³C NMR (126 MHz, CDCl₃) δ 163.4, 150.1, 140.2, 101.8, 88.4, 84.1, 82.1, 69.4, 68.9, 66.4, 58.6, 56.4, 25.8, 18.3, −4.4, −4.7 ppm. HRMS calc. for C₂₀H₃₆N₃O₇Si [M+H]⁺ 458.2323, found 458.2315.

### 1-[(2R,5R)-4-hydroxy-3-methoxy-5-(1-piperidyloxymethyl)tetrahydrofuran-2-yl]pyrimidine-2,4-dione (12)

[chemical structure]

[1381] To a solution of 10 (0.30 g, 0.66 mmol) in THF (5 mL) at 25° C., tetrabutylammonium fluoride, 1M in THF (0.99 mmol, 0.99 mL) was added slowly in single portion and then stirred for 5 hr. Volatile matters were removed in high vacuum pump and crude residue thus obtained was purified by column chromatography (gradient: 10-60% EtOAc in hexane) to afford 12 (0.17 g, 76% yield). ¹H NMR (400 MHz, CDCl₃) δ 8.79 (s, 1H), 7.97 (d, J=8.2 Hz, 1H), 5.94 (d, J=2.2 Hz, 1H), 5.71 (dd, J=8.2, 1.8 Hz, 1H), 4.20 (td, J=7.4, 5.2 Hz, 1H), 4.16-4.11 (m, 1H), 4.08 (dt, J=7.1, 2.6 Hz, 1H), 3.95 (dd, J=11.2, 2.7 Hz, 1H), 3.77 (dd, J=5.2, 2.3 Hz, 1H), 3.61 (s, 3H), 3.36 (s, 2H), 2.84 (d, J=7.7 Hz, 1H), 2.39 (t, J=11.4 Hz, 2H), 1.76 (d, J=13.0 Hz, 2H), 1.59 (brs, 2H) ppm. ¹³C NMR (101 MHz, CDCl₃) δ 163.2, 150.2, 140.2, 102.0, 87.6, 84.0, 83.1, 69.5, 69.1, 58.8, 57.0, 56.7, 25.5, 23.5 ppm. HRMS calc. for C₁₅H₂₄N₃O₆ [M+H]⁺ 342.1665, found 342.1656.

### Synthesis of 1-[(2R,5R)-4-hydroxy-3-methoxy-5-(morpholinooxymethyl) tetrahydrofuran-2-yl]pyrimidine-2,4-dione (13)

[chemical structure]

[1382] To a solution of 11 (0.85 g, 1.86 mmol) in THF (15 mL) at 22° C., tetrabutylammonium fluoride, 1M in THF (2.41 mmol, 2.41 mL) was added slowly in single portion and then stirred for 3 hr. Volatile matters were removed in high vacuum pump and crude residue thus obtained was purified by column chromatography (gradient: 0-5% MeOH in DCM) to afford 13 (0.52 g, 81% yield) as white solid. ¹H NMR (500 MHz, CDCl₃) δ 9.26 (s, 1H), 7.85 (d, J=8.2 Hz, 1H), 5.93 (d, J=2.1 Hz, 1H), 5.73 (d, J=8.2 Hz, 1H), 4.23-4.14 (m, 2H), 4.08 (dt, J=7.3, 2.9 Hz, 1H), 3.98 (dd, J=11.3, 3.2 Hz, 1H), 3.92 (d, J=11.7 Hz, 2H), 3.81-3.71 (m, 1H), 3.62 (s, 5H), 3.25 (t, J=9.1 Hz, 2H), 2.81 (d, J=8.3 Hz, 1H), 2.67 (td, J=10.9, 3.2 Hz, 2H) ppm. ¹³C NMR (101 MHz, CDCl₃) δ 163.4, 150.2, 140.0, 102.1, 87.7, 83.7, 82.7, 69.6, 68.9, 66.3, 58.9, 56.5, 56.23 ppm. HRMS calc. for C₁₄H₂₂N₃O₇ [M+H]⁺ 344.1458, found 344.1465.

### Synthesis of 3-[(diisopropylamino)-[(2R,5R)-5-(2,4-dioxopyrimidin-1-yl)-4-methoxy-2-(1-piperidyloxy methyl)tetrahydrofuran-3-yl]oxy-phosphanyl]oxypropanenitrile (14)

[chemical structure]

[1383] To a clear solution of 12 (0.60 g, 1.76 mmol) in DCM (20 mL), diisopropylethylamine (1.15 g, 8.79 mmol, 1.55 mL) and N-methylimidazole (0.51 g, 6.15 mmol, 0.49 mL) were added at 22° C. To this reaction mixture, 2-cyanoethyl-N,N-diisopropylchlorophosphoramidite (0.88 g, 3.52 mmol, 0.82 mL) was added slowly after 5 minutes and stirred for 0.5 hr. Reaction mixture was diluted with DCM (10 mL) and quenched with 10% NaHCO₃ solution (20 mL). Organic layer was separated, dried on anhydrous Na₂SO₄, filtered and filtrate was evaporated to dryness. The crude compound was thus obtained was purified by column chromatography (gradient: 20-80% EtOAc in hexane) to afford 14 (0.66 g, 70% yield) as hygroscopic solid. ¹H NMR (400 MHz, CDCl₃) δ 8.81 (s, 1H), 7.96 (dd, J=10.9, 8.1 Hz, 1H), 5.97 (d, J=3.7 Hz, 1H), 5.69 (d, J=8.1 Hz, 1H), 4.49-4.16 (m, 2H), 4.09 (td, J=11.2, 2.3 Hz, 1H), 3.98-3.77 (m, 4H), 3.72-3.58 (m, 2H), 3.51 (d, J=14.2 Hz, 3H), 3.39-3.23 (m, 2H), 2.64 (dt, J=11.9, 6.3 Hz, 2H), 2.39 (d, J=10.5 Hz, 2H), 1.73 (s, 2H), 1.58 (s, 3H), 1.30-1.06 (m, 15H) ppm. ¹³C NMR (101 MHz, CDCl₃) δ 163.4, 163.4, 150.4, 150.3, 140.4, 140.2, 117.8, 117.6, 102.1, 102.0, 87.8, 87.5, 83.5, 83.4, 83.1, 83.1, 82.4, 82.4, 82.2, 82.2, 70.9, 70.7, 70.1, 70.0, 69.6, 69.5, 58.9, 58.7, 58.7, 58.3, 58.3, 58.2, 58.1, 58.0, 56.9, 53.6, 43.6, 43.5, 43.4, 43.4, 25.4, 24.8, 24.7, 24.7, 24.7, 24.7, 23.5, 23.4, 20.6, 20.5, 20.5, 20.5 ppm. ³¹P NMR (162 MHz, CDCl₃) δ 150.98, 150.54 ppm. HRMS calc. for C₂₄H₄₁N₅O₇P [M+H]⁺ 542.2744, found 542.2747.

### Synthesis of 3-[(diisopropylamino)-[(2R,5R)-5-(2,4-dioxopyrimidin-1-yl)-4-methoxy-2-(morpholinooxymethyl)tetrahydrofuran-3-yl]oxy-phosphanyl]oxypropane nitrile (15)

[chemical structure]

[1384] To a solution of 13 (0.3 g, 0.87 mmol) in dry acetonitrile (10 mL) was added 5-(ethylthio)-1H-tetrazole (0.12 g, 0.87 mmol). 2-Cyanoethyl-N,N,N′,N′-tetraisopropylphosphordiamidite (1.14 mmol, 0.37 mL) was added slowly to the reaction mixture and stirred at 22° C. for 3 hr. The reaction mixture was filtered, volatile matters were removed under high vacuum pump and residue was purified by flash column chromatography using a gradient of EtOAc in hexane containing 0.2% triethylamine to yield 15 (0.31 g, 65% yield) as white solid. To remove P (V) impurity from the column purified compound, 15 was dissolved in methyl tert-butylether (MTBE) (25 mL) and washed with 50% DMF in water (2×10 mL) and the with brine (3×20 mL). Organic layer was separated, dried over anhydrous Na₂SO₄, filtered and filtrate was evaporated under high vacuum pump to obtain 15 as white foam. ¹H NMR (400 MHz, CD₃CN) δ 8.94 (s, 1H), 7.76 (dd, J=8.9, 8.2 Hz, 1H), 5.88 (dd, J=7.3, 4.6 Hz, 1H), 5.65 (dd, J=8.2, 3.0 Hz, 1H), 4.50-4.14 (m, 2H), 4.08-3.98 (m, 1H), 3.92-3.74 (m, 5H), 3.65 (dtd, J=10.3, 6.8, 4.7 Hz, 2H), 3.56-3.36 (m, 6H), 3.21 (d, J=10.2 Hz, 2H), 2.75-2.51 (m, 4H), 1.28-1.10 (m, 17H) ppm. ¹³C NMR (126 MHz, CD₃CN) δ 163.9, 163.9, 151.4, 151.4, 141.0, 141.0, 119.6, 119.6, 102.8, 102.7, 88.4, 87.9, 83.5, 83.5, 83.2, 83.2, 83.2, 83.1, 82.7, 82.7, 72.2, 72.0, 71.6, 71.5, 71.0, 70.9, 66.8, 66.8, 59.8, 59.6, 59.2, 59.1, 58.9, 58.9, 58.6, 58.6, 57.2, 57.0, 49.5, 44.2, 44.2, 44.1, 44.1, 27.2, 25.0, 25.0, 24.9, 24.9, 24.9, 24.8, 21.1, 21.0, 21.0 ppm. ³¹P NMR (202 MHz, CD₃CN) δ 151.48, 151.16 ppm HRMS calc. for C₂₃H₃₈N₅O₈PNa [M+Na]⁺ 566.2356, found 566.2379.

Synthesis of Oligonucleotides from Modified Morpholino Building Blocks

[chemical structure]

### Oligonucleotide Synthesis and Purification

[1385] Oligonucleotides were synthesized on K&A H-8-SE at 40-μmol scale using universal supports. A solution of 0.25 M 5-(S-ethylthio)-1H-tetrazole in acetonitrile (CH₃CN) was used as the activator. The solutions of commercially available phosphoramidites and synthesized phosphoramidities were used at 0.15 M in anhydrous CH₃CN or CH₂Cl₂. The oxidizing reagent was 0.02 M I₂ in THF/pyridine/H₂O. N,N-Dimethyl-N′-(3-thioxo-3H-1,2,4-dithiazol-5-yl) methanimidamide (DDTT), 0.1 M in pyridine, was used as the sulfurizing reagent. The detritylation reagent was 3% dichloroacetic acid in CH₂Cl₂. Waiting time for coupling, capping, oxidation, and sulfurization step are 450s, 25s, 80s and 300s respectively. After completion of the automated synthesis, the oligonucleotide was manually released from support and deprotected using 28-30% ammonium hydroxide solution at 60° C. for 5 h.

[1386] After filtration through a 0.45-μm nylon filter, oligonucleotides were purified by ion exchange and/or reverse phase column chromatography. For ion exchange, preparative HPLC custom packed with TSKGel SuperQ-5 PW (20) (Sigma) using an appropriate gradient of mobile phase (buffer A: 20 mM sodium phosphate, 15% CH₃CN, pH 8.5; buffer B: 1 M NaBr, 20 mM sodium phosphate, 15% CH₃CN, pH 8.5) and desalted using size-exclusion chromatography using a custom packed with Sephadex G25 (GE Healthcare) and water as an eluent. Oligonucleotides were then quantified by measuring the absorbance at 260 nm. Extinction coefficients were calculated using the following extinction coefficients for each residue: A, 13.86; T/U, 7.92; C, 6.57; and G, 10.53 M-1 cm-1. The purity and identity of modified ONs were verified by analytical reRP-HPLC chromatography and mass spectrometry, respectively.

### HPLC Conditions

[1387] For ON1-ON16 buffer A: 95 mM hexafluoroisopropanol, 16.3 mM TEA, 0.05 mM EDTA; buffer B: MeOH gradient 2-29% B for 39 min.

TABLE 11
Sequences and mass spectroscopy
characterization of target sequence
using morpholino-conjugated
building blocks

| | Sense and | SEQ | | | | |
|---|---|---|---|---|---|---|
| En- | antisense | ID | Tar- | S/ | Mass (M-H)⁻ | |
| tryª | strand (5′-3′)^{b} | NO | get | AS | Calcd. | Obsd. |
| ON1 | Mo1•g•UgAcAaAUA | 160 | Apob | S | 8795.45 | 8796.14 |
| | uGgGcAuCaAL | | | | | |
| ON2 | Mo2•g•UgAcAaAUA | 161 | Apob | S | 8809.48 | 8809.84 |
| | uGgGcAuCaAL | | | | | |
| ON3 | Pip•g•UgAcAaAUA | 162 | Apob | S | 8809.48 | 8809.76 |
| | uGgGcAuCaAL | | | | | |
| ON4 | Mo3•g•UgAcAaAUA | 163 | Apob | S | 8811.45 | 8811.86 |
| | uGgGcAuCaAL | | | | | |
| ON5 | u•g•UgAcAaAUAuG | 164 | Apob | S | 8726.35 | 8726.92 |
| | gGcAuCaAL | | | | | |
| ON6 | u•U•gAuGcCcAuau | 165 | Apob | AS | 7530.89 | 7531.36 |
| | UuGuCaCa•a•a | | | | | |
| ON7 | Mo1•U•gAuGcCcAu | 166 | Apob | AS | 7599.99 | 7600.36 |
| | auUuGuCaCa•a•a | | | | | |
| ON8 | Mo2•U•gAuGcCcAu | 167 | Apob | AS | 7614.02 | 7613.96 |
| | auUuGuCaCa•a•a | | | | | |
| ON9 | Mo2•u•gAuGcCcAu | 168 | Apob | As | | |
| | auUuGuCaCa•a•a | | | | | |
| ON10 | Pip•U•gAuGcCcAu | 169 | Apob | AS | 7614.02 | 7614.23 |
| | auUuGuCaCa•a•a | | | | | |
| ON11 | Mo3•U•gAuGcCcAu | 170 | Apob | AS | 7615.99 | 7616.39 |
| | auUuGuCaCa•a•a | | | | | |
| ON12 | u•U•auaGagcaaga | 171 | TTR | AS | 7655.12 | 7655.90 |
| | AcAcuguu•u•u | | | | | |
| ON13 | VPu•U•auaGagcaa | 172 | TTR | AS | 7731.12 | 7730.80 |
| | gaAcAcuguu•u•u | | | | | |
| ON14 | Mo1•U•auaGagcaa | 173 | TTR | AS | 7724.22 | 7724.68 |
| | gaAcAcuguu•u•u | | | | | |
| ON15 | Mo2•U•auaGagcaa | 174 | TTR | AS | 7738.25 | 7736.78 |
| | gaAcAcuguu•u•u | | | | | |
| ON16 | Pip•U•auaGagcaa | 175 | TTR | AS | 7738.25 | 7738.46 |
| | gaAcAcuguu•u•u | | | | | |
| ON17 | Mo3•U•auaGagcaa | 176 | TTR | AS | 7740.22 | 7739.79 |
| | gaAcAcuguu•u•u | | | | | |

^{a}ON12 and ON13 were synthesized following the previously reported procedure⁴
^{b}Chemical modifications are indicated as follows: VP, vinylphosphonate;
•, PS linkage; lower case, 2-OMe; italicized upper case, 2′-F; L, trivalent-GalNAc respectively. Structures of Mo1, Mo2, Mo3, Pip and L are shown in FIG. 33.

### ApoB Assay:

[1388] All studies were conducted using protocols consistent with local, state, and federal regulations, as applicable, and were approved by the Institutional Animal Care and Use Committee (IACUC) at Alnylam Pharmaceuticals. Only female C57BL/6 mice (Charles River Laboratories) of 6 −8 weeks old mice used. Mice were received subcutaneous administration of test article solutions at a dose volume of 10 μL/g. There are 3 mice for each group and mice were gave a single subcutaneous (s.c.) administration of siRNA at 3 mg/kg at day 0. Plasma samples were collected by using EDTA collection tube at days 0 (pre-dose), 7, 14, and 21. Mouse Apo-B protein levels were determined using Mouse Apo B SimpleStep ELISA® Kit (Abcma; cat, No. ab230932), in accordance with the manufacturer's protocol, and data were normalized to pre-bleed target protein levels.

TABLE 12
Duplexes for in vivo silencing

| | Sense strand (upper) and | SEQ |
|---|---|---|
| Duplex | antisense strand | ID |
| ID | (lower)ª (5′-3′) | NO |
| I | Mo1•g•UgAcAaAUAuGgGcAuCaAL | 177 |
| | u•U•gAuGcCcAuauUuGuCaCa•a•a | 178 |
| parent | u•g•UgAcAaAUAuGgGcAuCaAL | 179 |
| | u•U•gAuGcCcAuauUuGuCaCa•a•a | 180 |
| II | u•g•UgAcAaAUAuGgGcAuCaAL | 181 |
| | Mo1•U•gAuGcCcAuauUuGuCaCa•a•a | 182 |
| III | Mo2•g•UgAcAaAUAuGgGcAuCaAL | 183 |
| | u•U•gAuGcCcAuauUuGuCaCa•a•a | 184 |
| IV | Pip•g•UgAcAaAUAuGgGcAuCaAL | 185 |
| | u•U•gAuGcCcAuauUuGuCaCa•a•a | 186 |
| V | Mo3•g•UgAcAaAUAuGgGcAuCaAL | 187 |
| | u•U•gAuGcCcAuauUuGuCaCa•a•a | 188 |
| VI | u•g•UgAcAaAUAuGgGcAuCaAL | 189 |
| | Mo2•UsgAuGcCcAuauUuGuCaCa•a•a | 190 |
| VII | u•g•UgAcAaAUAuGgGcAuCaAL | 191 |
| | Pip•U•gAuGcCcAuauUuGuCaCa•a•a | 192 |
| VIII | u•g•UgAcAaAUAuGgGcAuCaAL | 193 |
| | Mo3•U•gAuGcCcAuauUuGuCaCa•a•a | 194 |
| si-5 | u•g•UgAcAaAUAuGgGcAuCaAL | 195 |
| | Mo2•u•gAuGcCcAuauUuGuCaCa•a•a | 196 |
| si-6 | u•g•UgAcAaAUAuGgGcAuCaAL | 197 |
| | u•u•gAuGcCcAuauUuGuCaCa•a•a | 198 |
| si-7 | u•g•UgAcAaAUAuGgGcAuCaAL | 199 |
| | Mo2•U•gAuGcCcAuauUuGuCaCa•a•a | 200 |
| si-8 | Mo2•G•UgAcAaAUAuGgGcAuCaAL | 201 |
| | u•U•gAuGcCcAuauUuGuCaCa•a•a | 202 |
| si-9 | Mo2•g•UgAcAaAUAuGgGcAuCaAL | 203 |
| | u•U•gAuGcCcAuauUuGuCaCa•a•a | 204 |
| si-10 | u•g•UgAcAaAUAuGgGcAuCaAL | 205 |
| | u•U•gAuGcCcAuauUuGuCaCa•a•a | 206 |

^{a}Chemical modifications are indicated as follows:
•, PS linkage; lower case, 2′-OMe; upper case, 2′-F;
L, trivalent-GalNAc respectively. Structures of Mo1, Mo2, Mo3, Pip and L are shown in FIG. 33.

### On- and Off-Target Activity Determination (Luciferase Reporter Assay):

[1389] COS-7 cells were cultured at 37° C., 5% CO₂ in Dulbecco's Modified Eagle Medium supplemented with 10% fetal bovine serum. Cells were co-transfected in 96-well plates (15,000 cells/well) with 10 ng luciferase reporter plasmid and 0.64 pM to 50 nM siRNA in 5-fold dilutions using 2 μL Lipofectamine 2000 (Thermo Fisher Scientific) according to manufacturer's instructions. Cells were harvested at 48 hours after transfection for the dual luciferase assay (Promega) according to manufacturer's instructions. The on-target reporter plasmid contained a single site perfectly complementary to the antisense strand in the 3′ untranslated (3′ UTR) of Renilla luciferase. The off-target reporter plasmid contained four tandem seed-complementary sites separated by a 19-nucleotide spacer (TAATATTACATAAATAAAA) in the 3′ UTR of Renilla luciferase. Both plasmids co-expressed firefly luciferase as a transfection control.

[1390] Primary rat hepatocytes (BioreclamationIVT) were seeded in 96-well collagen I pre-coated plates (Gibco) at approximately 50,000 cells/well in 95 μL INVITROGRO CP Rodent Medium (BioreclamationIVT). Pre-incubated lipid/siRNA complex (0.25 μL RNAiMax (Thermo Fisher Scientific) and 1 μL siRNA in 3.75 μL Opti-MEM for 15 min) was added to transfect the cells and incubated for 48 h at 37° C. in an atmosphere of 5% CO₂. The final concentration of the siRNA was 50 nM, and each siRNA was tested in quadruplicate. The media was removed, RNA was extracted using the miRNeasy 96 kit (Qiagen), cDNA library was prepared with the TruSeq Stranded Total RNA Library Prep Kit (Illumina) and sequenced on the HiSeq or NextSeq500 sequencers (Illumina), all according to manufacturers' instructions. Raw RNAseq reads were filtered with minimal mean quality scores of 25 and minimal remaining length of 36, using fastq-mcf. Filtered reads were aligned to the Rattus norvegicus genome (Rnor_6.0) using STAR (ultrafast universal RNAseq aligner) with default parameters. Uniquely aligned reads were counted by feature Counts.⁵ Differential gene expression analysis was performed using the R package DESeq2.

TABLE 13
IC₅₀ data on the on-target activity in luciferase reporter assay

| | IC50 | |
|---|---|---|
| siRNA | (nM) | IC50 change (fold to parent) |
| ON11 (parent) | 0.0075 | 1.0 |
| ON13 (Mo1) | 0.0961 | 13 |
| ON14 (Mo2) | 0.2216 | 30 |
| ON15 (Pip) | 0.0102 | 1.4 |
| ON16 (Mo3) | 0.0107 | 1.4 |

In Vitro Relative hAgo2 Binding Assay:

[1391] Two and a half μg of anti-FLAG M2 antibody was incubated with 20 ul of Dynabeads® Protein G (Life Technologies) in phosphate buffered saline supplemented with 0.02% Tween-20. After washing in fresh buffer, 4 μg of N-terminal FLAG-tagged recombinant human Ago2 (Active Motif) was incubated for 10 minutes at room temperature with gentle rotation, and unbound protein was removed by washing in 1×PBS. Beads were resuspended in Ago2 binding and wash buffer (150 mM NaCl, 20 mM Tris pH 8.0, 2 mM MgCl2, 0.5 mM TCEP) Antisense RNAs were added to hAgo2 protein immobilized on Dynabeads to a final concentration of 0.05 μg in 40 μl final volume and allowed to incubate for 1 hour at 37° C. After washing beads 3 times in 1 ml PBST (0.25% Triton X-100), total loaded AS RNA was quantified using stem-loop RT-qPCR as previously described.⁶ Data represents N=3 replicate measurements.

### REFERENCES

[1392] 1. M. J. Fer, P. Doan, T. Prange, S. Calvet-Vitale and C. Gravier-Pelletier, J. Org. Chem., 2014, 79, 7758-7765.
[1393] 2. A. Varizhuk, A. Chizhov, I. Smirnov, D. Kaluzhny and V. Florentiev, Eur. J. Org. Chem., 2012, 2173-2179.
[1394] 3. M. Israel and R. J. Murray, J. Med. Chem., 1982, 25, 24-28.
[1395] 4. P. Kumar, R. G. Parmar, C. R. Brown, J. L. S. Willoughby, D. J. Foster, I. R. Babu, S. Schofield, V. Jadhav, K. Charisse, J. K. Nair, K. G. Rajeev, M. A. Maier, M. Egli and M. Manoharan, Chem. Commun., 2019, 55, 5139-5142.
[1396] 5. Y. Liao, G. K. Smyth and W. Shi, Bioinformatics, 2014, 30, 923-930.
[1397] 6. C. Chen, D. A. Ridzon, A. J. Broomer, Z. Zhou, D. H. Lee, J. T. Nguyen, M. Barbisin, N. L. Xu, V. R. Mahuvakar, M. R. Andersen, K. Q. Lao, K. J. Livak and K. J. Guegler, Nucleic Acids Res., 2005, 33, e179-e179.

### Example 3: Synergy Between Modifications at 5′-End of Sense and Antisense Strand Improves Efficacy of siRNAs

[1398] Year 2018 mark the beginning of short RNA duplexes as a new class of medicines. These short duplexes are often 21-mer long with a 2-nucleotide overhang and are knows as small interfering RNAs (siRNAs). siRNAs take advantage RNA interference (RNAi) pathway, an endogenous mechanism used by cells to control gene expression. Exogeneous siRNAs when administrated to cells interact with RNA Induced Silencing Complex (RISC) complex which retains one strand (antisense strand) and removes other strand (sense strand). RISC complex with antisense strand then target mRNA of intended gene and halts the gene expression. Various factors such as thermodynamic asymmetry between two ends of siRNA, identity of first nucleotide at 5′-end determines the selection of antisense strand. However, use of modified nucleotide at the 5′-end to induce strand bias is known. In this regard, we recently showed that presence of 5′-morpholino-2′-OMe nucleotide at the 5′-end improves strand selection and RNAi activity by blocking loading of sense strand into RISC. In a complementary approach, we have shown that the loading of the antisense strand into active RISC can be improved by modification of the 5′ terminus with (E)-vinylphosphonate (E-VP); E-VP acts as a bioisostere of the natural 5′-monophosphate. 5′-monophosphate plays an important role in the strand selection through interactions in mid-domain. Thus, installing a VP (a mimic of monophosphate) at the 5′-end of antisense strand and a morpholino ring at the 5′-end of sense strand would tilt the strand bias completely in favor of loading of antisense strand loading. Locked nucleic acids (LNA) binds strongly to target RNA, improves stability against nucleases. These two factors could be advantageous in siRNA design as LNA on 5′-end can modulate thermodynamic asymmetry between two ends (making the end with 5′-end of sense strand more stable) and can also improve metabolic stability of sense strand. LNA in combination with morpholino at 5′-end will strongly disfavor the loading of sense strand. We present synthesis of new 5′-morpholino LNA building blocks (FIG. 27) with the aim of optimizing RNAi activity. Our goals are to 1) block the loading of sense strand by preventing phosphorylation (5′-morpholino), 2) improve metabolic stability against 5′-exonucleases (LNA), and 3) promote loading of antisense strand (5′-E-VP). Using this strategy, metabolically stable and active siRNA are obtained.

### Materials and Methods:

[1399] General: Commercially available starting materials, reagents, and solvents were used as received. All moisture-sensitive reactions were carried under anhydrous conditions under argon atmosphere. Flash chromatography was performed on a Teledyne ISCO Combi Flash system using pre-packed ReadySe.p Teledyne ISCO silica gel columns. TLC was performed on Merck silica-coated plates 60 F₂₅₄. Compounds were visualized under UV light (254 nm) or after spraying with the p-anisaldehyde staining solution followed by heating. ESI-HRMS spectra were recorded on Waters QTof API US spectrometer using the direct flow injection in the positive mode (capillary=3000 kV, cone=35, source temperature=120° C., and desolvation temperature=350° C.). ¹H and ¹³C NMR spectra were recorded at room temperature on Varian spectrometers, and chemical shifts in ppm are referenced to the residual solvent peaks. Coupling constants are given in Hertz. Signal splitting patterns are described as singlet(s), doublet (d), triplet (t), quartet (q), broad signal (br), or multiplet (m). ³¹P NMR spectra were recorded under proton-decoupled mode; chemical shifts are referenced to external H₃PO₄ (80%).

[chemical structure]

### Synthesis of nucleoside 2 (PK-5219-129)

[chemical structure]

[1400] Nucleoside 1 (11.0 g, 19.7 mmol) was dissolved in dry DMF (30 mL). To this was added imidazole (1.70 g, 24.9 mmol) followed by tert-butyldimethylsilyl chloride (3.6 g, 23.8 mmol) and the mixture was stirred at room temperature for 18 h. The reaction mixture was diluted with EtOAc (200 mL) and washed with saturated aqueous solution of NaHCO₃ (2×50 mL). The organic phase was dried (MgSO₄) and concentrated under reduced pressure. The crude was purified by column chromatography using a gradient of 0-70% EtOAc in hexane to obtain fully protected nucleoside (10.7 g). To this was added a solution of dichloroacetic acid in CH₂Cl₂ (3% wt/v, 120 mL). The reaction mixture was stirred for 1 h whereupon MeOH (5 mL) was added and stirring was continued for another 20 minutes. The solvents were removed, and the residue was purified by column chromatography using a gradient of 0-12% MeOH in CH₂Cl₂ to afford PK-5219-129 (4.95 g, 70%). ¹H NMR (400 MHz, DMSO) δ 11.36 (s, 1H), 7.74 (d, J=8.1 Hz, 1H), 5.63 (dd, J=8.1, 2.2 Hz, 1H), 5.44 (d, J=0.7 Hz, 1H), 5.20 (t, J=5.3 Hz, 1H), 4.14 (s, 1H), 4.00 (s, 1H), 3.79 (d, J=7.7 Hz, 1H), 3.76-3.67 (m, 2H), 3.65 (d, J=7.8 Hz, 1H), 0.84 (s, 9H), 0.07 (s, 3H), 0.05 (s, 3H).

### Synthesis of nucleoside 3 (PK-5308-149)

[chemical structure]

[1401] To a solution of 2 (PK-5219-129) (2.0 g, 5.39 mmol) in CH₂Cl₂ was added 4-dimethylaminopyridine (DMAP, 1.32 g, 10.78 mmol) and 4-toluenesulfonyl chloride (TosCI, 1.28, 6.74 mmol) at 0° C. The reaction mixture was slowly warm to room temperature and stirred for 2 h. The reaction mixture was diluted with CH₂Cl₂ (100 mL) and washed with saturated aqueous solution of NaHCO₃ (50 mL). The aqueous phase was back extracted with CH₂Cl₂ (50 mL), and combined organic phase was dried (MgSO₄) and concentrated at reduced pressure. The residue was purified by column chromatography using a gradient of 0-4% MeOH in CH₂Cl₂ to afford nucleoside 3 (PK-5219-149) (2.15 g, 75%). MS (ESI⁺) m/z calcd for C₂₃H₃₃N₂O₈SSi [M+H]⁺ 525.1727, found 525.1724. ¹H NMR (400 MHz, DMSO) δ 11.37 (d, J=2.1 Hz, 1H), 7.86-7.73 (m, 2H), 7.51-7.49 (m, 3H), 5.56 (dd, J=8.1, 2.2 Hz, 1H), 5.45 (s, 1H), 4.62 (d, J=11.8 Hz, 1H), 4.23-4.20 (d, 2H), 4.00 (s, 1H), 3.79-3.63 (m, 2H), 2.41 (s, 3H), 0.75 (s, 9H), 0.02 (s, 3H), 0.01 (s, 3H). ¹³C NMR (126 MHz, DMSO) δ 163.17, 149.90, 145.43, 138.95, 131.44, 130.29, 127.71, 101.00, 86.84, 85.26, 78.65, 70.96, 70.82, 66.03, 25.29, 21.07, 17.41, −5.00, −5.49.

### Synthesis of nucleoside 4 (PK-5308-02)

[chemical structure]

[1402] Nucleoside 3 (PK-5308-149) (1.80 g, 3.43 mmol) was dissolved in morpholine (15 mL). The reaction mixture was stirred at 60° C. for 40 h. The solvent was removed, and the residue was dissolved in EtOAc (100 mL) and washed with H2O (50 mL). The aqueous phase was back extracted with EtOAC (2×25 mL). The combined organic phase was dried (MgSO₄) and concentrated at reduced pressure. The crude was purified by column chromatography using a gradient of 0-6% MeOH in CH₂Cl₂ to afford 4 (PK-5308-02) (1.10 g, 73%). MS (ESI⁺) m/z calcd for C₂₀H₃₄N₃O₆Si [M+H]⁺ 440.2217, found 440.2220. ¹H NMR (500 MHz, DMSO) δ 11.35 (s, 1H), 7.71 (d, J=8.1 Hz, 1H), 5.66 (d, J=8.1 Hz, 1H), 5.46 (s, 1H), 4.15 (s, 1H), 3.94 (s, 1H), 3.81 (d, J=8.0 Hz, 1H), 3.72 (d, J=8.0 Hz, 1H), 3.57-3.55 (m, 4H), 2.74 (d, J=14.5 Hz, 1H), 2.68 (d, J=14.5 Hz, 1H), 2.57-2.53 (m, 2H), 2.47-2.43 (m, 2H), 0.84 (s, 9H), 0.06 (s, 6H). ¹³C NMR (126 MHz, DMSO) δ 163.22, 149.95, 139.11, 101.06, 88.41, 86.60, 78.25, 71.85, 71.22, 66.24, 54.87, 54.29, 25.44, 17.57, −4.84, −5.30.

### Synthesis of nucleoside 5 (PK-5308-10)

[chemical structure]

[1403] To a solution of 4 (PK-5308-02) (1.05 g, 2.38 mmol) in THF was added tetrabutylammonium fluoride (TBAF, 1M in THF, 3.60 mL, 3.60 mmol). The reaction mixture was stirred at room temperature for 1 h. The solvent was removed, and the crude was purified by column chromatography using a gradient of 0-5% MeOH in EtOAc to afford 5 (PK-5308-10) (0.70 g, 90%). MS (ESI⁺) m/z calcd for C₁₄H₂₀N₃O₆ [M+H]⁺ 326.1352, found 326.1360. ¹H NMR (500 MHz, DMSO) δ 11.34 (s, 1H), 7.76 (d, J=8.1 Hz, 1H), 5.77-5.71 (m, 1H), 5.65 (d, J=8.1 Hz, 1H), 5.42 (s, 1H), 4.12 (s, 1H), 3.84 (d, J=8.0 Hz, 1H), 3.77 (d, J=3.2 Hz, 1H), 3.70 (d, J=8.0 Hz, 1H), 3.56 (t, J=4.7 Hz, 4H), 2.74 (s, 2H), 2.65-2.54 (m, 2H), 2.48-2.38 (m, 2H). ¹³C NMR (126 MHz, DMSO) δ 163.20, 149.95, 139.19, 100.92, 88.40, 86.48, 78.58, 71.60, 69.91, 66.31, 54.78, 54.50.

### Synthesis of nucleoside 6 (PK-5308-46)

[chemical structure]

[1404] To a suspension of nucleoside 5 (PK-5308-10) (0.65 g, 2.0 mmol) in anhydrous CH₂Cl₂ (5 mL) was added 2-Cyanoethyl N, N,N′, N′-tetraisopropylphosphordiamidite (PN₂ 1.20 g, 4 mmol) followed by 4,5 dicyanoimidazole (DCI, 0.29 mg, 2.5 mmol). The reaction mixture was stirred at room temperature for 3 h whereupon it was diluted with CH₂Cl₂ (50 mL) and washed with saturated aqueous NaHCO₃ (25 mL). The aqueous phase was back extracted with CH₂Cl₂ (25 mL), and the combined organic phase was dried (MgSO₄) and concentrated at reduced pressure. The residue was purified by column chromatography using a gradient of 0-2% MeOH in CH₂Cl₂ (containing 0.2% Et₃N) to afford 6 (PK-5308-46) (0.88 g, 84%). MS (ESI⁺) m/z calcd for C₂₃H₃₇N₅O₇P [M+H]⁺ 526.2431, found 526.2439. ³¹P NMR (202 MHz, CD₃CN) δ 149.90, 149.58.

[chemical structure]

[chemical structure]

[chemical structure]

### Synthesis of PK-5308-03

[chemical structure]

[1405] To a solution of nucleoside 1² (5.0 g, 7.29 mmol) in anhydrous DMF (20 mL) was added imidazole (0.74 g, 10.9 mmol), and tert-butyldimethylsilyl chloride (1.64 g, 10.9 mmol). The reaction mixture was stirred at room temperature for 20 h, diluted with EtOAc (200 mL) and washed with saturated aqueous solution of NaHCO₃ (2×100 mL). The combined aqueous phase was back extracted with EtOAc (100 mL). The combined organic phase was dried (MgSO₄) and concentrated under reduced pressure. To the residue was added a solution of dichloroacetic acid in CH₂Cl₂ (3% wt/v, 200 mL). The reaction mixture was stirred at room temperature for 1 h whereupon MeOH (5 mL was added). The reaction mixture was stirred again for 1 h. The reaction mixture was reduced to half under reduced pressure and neutralized with saturated aqueous solution of NaHCO₃ (200 mL) in an open flask. The content was transferred to a separating funnel and organic phase was washed with NaHCO₃ (200 mL). The combined aqueous phase was back extracted with CH₂Cl₂ (2×100 mL). The combined organic phase was dried (MgSO₄) and concentrated under reduced pressure. The residue was purified by column chromatography using a gradient of 0-2% MeOH in CH₂Cl₂ to afford 2 (PK-5308-03) (2.60 g, 72%). ¹H NMR (500 MHz, DMSO) δ 11.22 (s, 1H), 8.74 (s, 1H), 8.54 (s, 1H), 8.07-8.01 (m, 2H), 7.64 (t, J=7.4 Hz, 1H), 7.54 (t, J=7.7 Hz, 2H), 6.07 (s, 1H), 4.66 (s, 1H), 4.57 (s, 1H), 3.94 (d, J=7.8 Hz, 1H), 3.83 (d, J=7.8 Hz, 1H), 2.43 (d, J=7.2 Hz, 1H), 2.40 (d, J=7.1 Hz, 1H), 0.85 (s, 9H), 0.08 (s, 3H), 0.07 (s, 3H).

### Synthesis of nucleoside 3 (PK-5308-04)

[chemical structure]

[1406] To a solution of nucleoside 2 (PK-5308-3) (2.60 g, 5.22 mmol) in dry CH₂Cl₂ was added 4-dimethylaminopyridine (DMAP, 1.27 g, 10.44 mmol) and 4-toluenesulfonyl chloride (TosCl, 1.24, 6.53 mmol) at 0° C. The reaction mixture was slowly warm to room temperature and stirred for 3 h. The reaction mixture was diluted with CH₂Cl₂ (100 mL) and washed with saturated aqueous solution of NaHCO₃ (50 mL). The aqueous phase was back extracted with CH₂Cl₂ (50 mL), and combined organic phase was dried (MgSO₄) and concentrated at reduced pressure. The residue was purified by column chromatography using a gradient of 0-5% MeOH in CH₂Cl₂ to afford nucleoside 3 (PK-5308-4) (2.65 g, 77%). ¹H NMR (400 MHz, DMSO) δ 11.25 (s, 1H), 8.73 (s, 1H), 8.48 (s, 1H), 8.12-7.96 (m, 2H), 7.76 (d, J=8.4 Hz, 2H), 7.66-7.62 (m, 1H), 7.57-7.53 (m, 2H), 7.47-7.40 (m, 2H), 6.07 (s, 1H), 4.74 (s, 1H), 4.72 (s, 1H), 4.59 (d, J=11.7 Hz, 1H), 4.23 (d, J=11.7 Hz, 1H), 3.84 (d, J=8.1 Hz, 1H), 3.79 (d, J=8.1 Hz, 1H), 2.38 (s, 3H), 0.78 (s, 9H), 0.07 (s, 3H), 0.05 (s, 3H). ¹³C NMR (126 MHz, DMSO) δ 165.55, 151.52, 151.31, 150.44, 145.31, 142.56, 133.26, 132.45, 131.46, 130.16, 128.45, 128.44, 127.68, 125.59, 85.61, 85.03, 78.88, 72.37, 71.31, 66.39, 25.34, 21.03, 17.43, −4.94, −5.37.

### Synthesis of nucleoside 4 (PK-5308-12)

[chemical structure]

[1407] Nucleoside 3 (PK-5308-4) (2.5 g, 3.83 mmol) was taken in morpholine (30 mL). The reaction mixture for stirred at 60° C. for 2 days. The solvent was evaporated, and the crude was purified by column chromatography using a gradient of 0-8% MeOH in CH₂Cl₂ to afford PK-5308-08 (tentatively assigned by LCMS). To a solution of PK-5308-8 in MeOH (5 mL) was added DMF-DMA (400 μL, 3.01 mmol). The reaction mixture was stirred at room temperature for 18 h. Solvent was removed, and the residue was taken in CH₂Cl₂ (50 mL) and H₂O (50 mL). The layers were separated out and the aqueous phase was back extracted with CH₂Cl₂ (2×25 mL). The combined organic phase was dried (MgSO₄) and concentrated at reduced pressure. The residue was purified by column chromatography using a using a gradient of 0-5% MeOH in CH₂Cl₂ to afford 4 (PK-5308-12) (0.50 g, 25% from 3). ¹H NMR (400 MHz, DMSO) δ 8.90 (s, 1H), 8.40 (s, 1H), 8.29 (s, 1H), 5.98 (s, 1H), 4.70 (s, 1H), 4.55 (s, 1H), 3.92 (d, J=8.0 Hz, 1H), 3.86 (d, J=8.0 Hz, 1H), 3.53 (t, J=4.8 Hz, 4H), 3.19 (s, 3H), 3.12 (s, 3H), 2.74 (d, J=14.2 Hz, 1H), 2.69 (d, J=14.2 Hz, 1H), 2.57-2.50 (m, 2H), 2.45-2.36 (m, 2H), 0.85 (s, 9H), 0.09 (s, 3H), 0.08 (s, 3H). ¹³C NMR (126 MHz, DMSO) δ 159.25, 157.97, 151.83, 150.48, 140.75, 125.58, 88.06, 85.53, 78.73, 73.03, 72.30, 66.17, 55.06, 54.73, 40.67, 34.56, 25.52, 17.64, −4.83, −5.14.

### Synthesis of nucleoside 5 (PK-5308-43)

[chemical structure]

[1408] Nucleoside 4 (PK-5308-12) (1.0 g, 1.93 mmol) was dissolved in THF (5 mL). To this was added TBAF (1M in THF, 2.4 mL, 2.4 mmol), and the reaction mixture was stirred at room temperature for 1 h. Solvent was removed, and the residue was purified by column chromatography using a using a gradient of 0-6% MeOH in EtOAc to afford 5 (PK-5308-43) (0.58 g, 74%). ¹H NMR (500 MHz, DMSO) δ 8.90 (s, 1H), 8.41 (s, 1H), 8.31 (s, 1H), 5.95 (s, 1H), 5.78 (d, J=4.4 Hz, 1H), 4.41 (s, 1H), 4.26 (d, J=4.4 Hz, 1H), 3.95 (d, J=8.1 Hz, 1H), 3.85 (d, J=8.1 Hz, 1H), 3.56 (t, J=4.8 Hz, 4H), 3.19 (s, 3H), 3.12 (s, 3H), 2.82 (d, J=14.3 Hz, 1H), 2.77 (d, J=14.3 Hz, 1H), 2.66-2.57 (m, 2H), 2.46-2.35 (m, 2H). ¹³C NMR (126 MHz, DMSO) δ 159.16, 157.95, 152.01, 150.47, 139.72, 125.51, 88.06, 85.24, 78.89, 71.94, 71.38, 66.21, 55.26, 54.66, 40.64, 34.53.

### Synthesis of nucleoside 6 (PK-5308-44)

[chemical structure]

[1409] To a suspension of nucleoside 5 (PK-5308-43) (0.55 g, 1.36 mmol) in anhydrous CH₂Cl₂ (5 mL) was added 2-Cyanoethyl N, N,N′, N′-tetraisopropylphosphordiamidite (PN₂ 0.82 g, 2.72 mmol) followed by 4,5 dicyanoimidazole (DCI, 0.20 mg, 1.7 mmol). The reaction mixture was stirred at room temperature for 3 h whereupon it was diluted with CH₂Cl₂ (50 mL) and washed with saturated aqueous NaHCO₃ (25 mL). The aqueous phase was back extracted with CH₂Cl₂ (20 mL), and the combined organic phase was dried (MgSO₄) and concentrated at reduced pressure. The residue was purified by column chromatography using a gradient of 0-2% MeOH in CH₂Cl₂ (containing 0.2% Et₃N) to afford 6 (PK-5308-44) (0.65 g, 79%). ³¹P NMR (202 MHz, CD₃CN) δ 149.80, 149.71.

[chemical structure]

[chemical structure]

[chemical structure]

[chemical structure]

[chemical structure]

[chemical structure]

[chemical structure]

[chemical structure]

[chemical structure]

[chemical structure]

[chemical structure]

[chemical structure]

[chemical structure]

[chemical structure]

[chemical structure]

[chemical structure]

[chemical structure]

### Oligonucleotide Synthesis

### Codex Monomers:

[chemical structure]

[1410] Oligonucleotide synthesis was carried out on ABI using standard procedure. The synthesis was performed at 1 μM scale using 5-ethylthio-1H-tetrazole as activator (0.25 M in dry CH₃CN), and I₂ in THF: pyridine as an oxidizer (for PO linkages). For PS linkages DDTT was used as an oxidizer. No final detritylation was performed for strands containing 5′-morpholino monomers.

[1411] The cleaveage and deprotection was performed using methylamine solution at room temperature for 90 minutes. And purification was performed using IEX buffers with a gradient of 15-40% buffer B over 30 column volume. Buffer A: 20 mM sodium phosphate contains 10-15% CH₃CN, Buffer B: 1M NaBr, 20 mM sodium phosphate contains 10-15% CH₃CN. After purification fractions containing pure oligonucleotide were pooled and desalted using sephadex columns.

TABLE 14
Exemplary modified oligonucleotides synthesized

| | | ON | SEQ | Mass | Mass |
|---|---|---|---|---|---|
| | | sequence | ID | ob- | calcu- |
| # | ALNY# | 5′-3′ | NO. | tained | lated |
| 1 | A- | Q340sasCfaGfuGfu | 207 | 8667.80 | 8669.29 |
| | 1036881.1 | UfCfUfuGfcUfcUfa | | | |
| | | UfaAfL96 | | | |
| 2 | A- | Q340asCfaGfuGfuU | 208 | 8651.70 | 8653.23 |
| | 1036882.1 | fCfUfuGfcUfcUfaU | | | |
| | | faAfL96 | | | |
| 3 | A- | Q340aCfaGfuGfuUf | 209 | 8635.56 | 8637.16 |
| | 1036883.1 | CfUfuGfcUfcUfaUf | | | |
| | | aAfL96 | | | |
| 4 | A- | Q340saCfaGfuGfuU | 210 | 8651.56 | 8653.23 |
| | 1037070.1 | fCfUfuGfcUfcUfaU | | | |
| | | faAfL96 | | | |
| 5 | A- | Q339sgsGfaAfgCfa | 211 | 8866.65 | 8867.44 |
| | 1037055.1 | GfUfAfuGfuUfgAfu | | | |
| | | GfgAfL96 | | | |
| 6 | A- | Q339gsGfaAfgCfaG | 212 | 8850.55 | 8851.38 |
| | 1037056.1 | fUfAfuGfuUfgAfuG | | | |
| | | fgAfL96 | | | |
| 7 | A- | Q339gGfaAfgCfaGf | 213 | 8834.67 | 8835.31 |
| | 1037057.2 | UfAfuGfuUfgAfuGf | | | |
| | | gAfL96 | | | |
| 8 | A- | Q339sgGfaAfgCfaG | 214 | 8850.54 | 8851.38 |
| | 1038565.1 | fUfAfuGfuUfgAfuG | | | |
| | | fgAfL96 | | | |
| 9 | A- | Q339sgsUfgAfcAfa | 215 | 8793.80 | 8794.43 |
| | 1036884.1 | AfUfAfuGfgGfcAfu | | | |
| | | CfaAfL96 | | | |
| 10 | A- | Q339gsUfgAfcAfaA | 216 | 8777.61 | 8778.37 |
| | 1036885.1 | fUfAfuGfgGfcAfuC | | | |
| | | faAfL96 | | | |
| 11 | A- | Q339gUfgAfcAfaAf | 217 | 8761.71 | 8762.30 |
| | 1036886.1 | UfAfuGfgGfcAfuCf | | | |
| | | aAfL96 | | | |
| 12 | A- | Q339sgUfgAfcAfaA | 218 | 8777.53 | 8778.37 |
| | 1308564.1 | fUfAfuGfgGfcAfuC | | | |
| | | faAfL96 | | | |
| 13 | A- | (Alns)asCfaGfuGf | 219 | 8599.50 | 8600.18 |
| | 265443.3 | uUfCfUfuGfcUfcUf | | | |
| | | aUfaAfL96 | | | |
| 14 | A- | (Aln)asCfaGfuGfu | 220 | 8583.40 | 8584.12 |
| | 899883.2 | UfCfUfuGfcUfcUfa | | | |
| | | UfaAfL96 | | | |
| 15 | A- | (Aln)aCfaGfuGfuU | 221 | 8567.30 | 8568.05 |
| | 899884.2 | fCfUfuGfcUfcUfaU | | | |
| | | faAfL96 | | | |
| 16 | A- | (Alns)aCfaGfuGfu | 222 | 8583.39 | 8584.12 |
| | 1318094.1 | UfCfUfuGfcUfcUfa | | | |
| | | UfaAfL96 | | | |

Structures of Q339, Q340, (Aln) and (Alns) are shown in FIG. 33.

dsRNAs

[1412] The modified strands were then mixed with appropriate antisense strands (obtained from inventory) and annealed together in 1×PBS buffer to obtain the exemplary duplexes shown in FIGS. 40-43.

### In Vitro Gene Silencing

[1413] 5 μL of siRNA was placed in a 384-well collagen-coated plate. To each well was added 5.0 μL of Opti-MEM and 0.1 μL of Lipofectamine RNAiMax (Invitrogen). The final siRNA concentrations were 0.1 or 10 nM. Plates were incubated at room temperature for 15 min. Primary mouse hepatocytes cells were suspended in media Invitrogro CP rodent medium (#Z990028 BioIVT) and 40 μL of this suspension (containing approximately 5000 cells) was added to each well. Each siRNA was assessed in quadruplicate. After incubating the cells for 24 h, RNA was isolated using DynaBeads (ThermoFisher). The RNA was then reverse transcribed into cDNA according to manufacturer's protocol (Applied Biosystems). Multiplex qPCR reactions were performed in duplicate using a gene specific TaqMan assay for Ttr (ThermoFisher Scientific, #Mm00443267_m1) and mouse Gapdh (#4352339E) as an endogenous control. Real-Time PCR was performed on a Roche LightCycler 480 using LightCycler 480 Probes Master Mix (Roche).

### In Vivo Gene Silencing

[1414] COS-7 cells were cultured at 37° C., 5% CO₂ in Dulbecco's Modified Eagle Medium (DMEM) supplemented with 10% fetal bovine serum (FBS). Cells were co-transfected in 96-well plates (15,000 cells/well) with 10 ng luciferase reporter plasmid and 0.64 pM to 50 nM siRNA in 5-fold dilutions using 2 μg/mL Lipofectamine 2000 (Thermo Fisher Scientific) according to manufacturer's instructions. Cells were harvested at 48 h after transfection for the dual luciferase assay (Promega) according to manufacturer's instructions. The on-target reporter plasmid contained a single perfectly-complementary site to the antisense strand in the 3′ untranslated (3′ UTR) of Renilla luciferase. The off-target reporter plasmid contained four tandem seed-complementary sites separated by a 19-nucleotide spacer d (TAATATTACATAAATAAAA) (SEQ ID NO. 259) in the 3′ UTR of Renilla luciferase. Both plasmids co-expressed Firefly luciferase as a transfection control.

### In Vivo Metabolic Stability

[1415] Female, 6-8 weeks old C56BL/6 mice were dosed at 1 mg/kg subcutaneously, with the control group receiving same volume of 1×PBS. Each group comprises 3 mice. Blood samples were collected just prior to treatment administration, and 3, 7, 14, 21 and 28 days after dosing. The collected serum samples were stored in −80° C. until further analysis. TTR protein levels in serum were quantified spectrophotometrically with a mouse pre-albumin/TTR ELISA kit (41-PALMS-E01), in accordance to the manufacturer's protocol (ALPCO, Salem, NH).

[1416] At day 28, the animals were euthanized, with the livers harvested and then cryopreserved. RNA from liver was isolated using the PerkinElmer Chemagic system (Waltham, MA), according to the supplier's guidelines. This was followed by cDNA preparation and multiplexed RT-qPCR analysis to assess the TTR transcript levels (Taqman probe Mm00443267_ml; mouse Gapdh 4351309 from ABI).

[1417] Schemes 4 and 5 show exemplary methods for the synthesis of modified phosphoramidites. Accordingly, 3′-O-TBDMS nucleotides were prepared in a single step from commercially available nucleosides. Tosylation followed by heating with morpholine produced 5′-morpholino nucleoside. The loss of benzoyl group was observed during the reaction with morpholine. The amidine group was installed. Removal of 3′-OTBDMS group followed by phosphitylation gave required amidites.

[1418] In vitro screening: To gauge the impact of combination of 5′-VP (antisense strand) and 5′-morpholino (sense strand), we chose our well-studied GalNAc-conjugated parent siRNA duplex targeting TTR. The study involved a set of 7 duplexes namely parent duplex (without any modification at the 5′-ends, entry 1), a duplex that carry 5′-VP on the antisense strand (entry 2), a duplex that carry 5′-morpholino on the sense strand (entry 3) and a duplex that carry both 5′-VP and 5′-morpholino modification (entry 4). Other three duplexes (entry 5-7) differ from duplex 4 only in the content of PS linkages in the sense strand. Results are shown in FIGS. 44A-44G and summarized in Table 15.

TABLE 15
IC₅₀ data on the on-target activity in
luciferase reporter assay for duplexes
that target mTTR

| | | | SEQ | | |
|---|---|---|---|---|---|
| | Alny | | ID | IC5 | |
| # | # | Duplex | No. | 0(nM) | |
| 1 | 57727 | 5′-AfsasCfaGfuGfuUfCfUfuGfcUfcUfaUfaAfL96 | 223 | 0.004 | Parent |
| | | 5′-usUfsaUfaGfaGfcAfagaAfcAfcUfgUfususu | 224 | | |
| 2 | 68895 | 5′-AfsasCfaGfuGfuUfCfUfuGfcUfcUfaUfaAfL96 | 225 | 0.0025 | Sense-OH |
| | | 5′-VPusUfsaUfaGfaGfcAfagaAfcAfcUfgUfususu | 226 | | Antisense-VP |
| 3 | 617745 | 5′-Q340aCfaGfuGfuUfCfUfuGfcUfcUfaUfaAfL96 | 227 | 0.0024 | Sense-Mo-no PS |
| | | 5′-VPusUfsaUfaGfaGfcAfagaAfcAfcUfgUfususu | 228 | | Antisense-VP |
| 4 | 617746 | 5′-Q340asCfaGfuGfuUfCfUfuGfcUfcUfaUfaAfL96 | 229 | 0.0033 | Sense-Mo-2^{nd} PS |
| | | 5′-VPusUfsaUfaGfaGfcAfagaAfcAfcUfgUfususu | 230 | | Antisense-VP |
| 5 | 617747 | 5′-Q340sasCfaGfuGfuUfCfUfuGfcUfcUfaUfaAfL96 | 231 | 0.0082 | Sense-Mo |
| | | 5′-VPusUfsaUfaGfaGfcAfagaAfcAfcUfgUfususu | 232 | | Antisense-VP |
| 6 | 617748 | 5′-Q340sasCfaGfuGfuUfCfUfuGfcUfcUfaUfaAfL96 | 233 | 0.0034 | Sense-Mo |
| | | 5′-usUfsaUfaGfaGfcAfagaAfcAfcUfgUfususu | 234 | | Antisense-OH |
| 7 | 617749 | 5′-Q340saCfaGfuGfuUfCfUfuGfcUfcUfaUfaAfL96 | 235 | 0.0035 | Sense-Mo-1st PS |
| | | 5′-VPusUfsaUfaGfaGfcAfagaAfcAfcUfgUfususu | 236 | | Antisense-VP |

Structure of Q340 is shown in FIG. 33.

[1419] Comparison of duplex 1 and 2 show the impact of VP on the RNAi activity (FIGS. 44A and 44B). As shown before presence of VP improves the efficacy. Duplexes 1 and 3 show comparable efficacy meaning presence of morpholino have no negative impact on activity (FIGS. 44A and 44C). Duplex 2, 4, 6, and 7 also showed similar activity suggesting no impact of absence or presence of PS backbone (FIGS. 44B, 44D, 44F and 44G). However, at day 7 showed significant improvement in efficacy for the duplexes carrying 5′-morpholino group than the corresponding duplexes with 5′-OH on the sense strand (FIGS. 44A-44G). Furthermore, activity was not affected by absence of PS backbone indicating that the LNA-morpholino can be providing enough metabolic stability even in the absence of PS backbone. Similar conclusion was made from day 28 qPCR data (FIG. 46). Thus, combination of VP-Morpholino showed the best activity and may not require presence of PS backbone on the sense strand. Reducing PS content would make the drug candidate stereochemically purer.

TABLE 16
IC₅₀ data on the on-target activity in
luciferase reporter assay for duplexes
that target F9

| Du- | | | SEQ | |
|---|---|---|---|---|
| plex | Alny | | ID | IC50 |
| # | # | Duplex | NO. | (nM) |
| 1 | 65315 | 5′-UfsgsGfaAfgCfaGfUf | 237 | 1.6511 |
| | | AfuGfuUfgAfuGfgAfL96 | | |
| | | 5′-usCfscAfuCfaAfcAfu | 238 | |
| | | acUfgCfuUfcCfasasa | | |
| 2 | 66575 | 5′-UfsgsGfaAfgCfaGfUf | 239 | 0.2849 |
| | | AfuGfuUfgAfuGfgAfL96 | | |
| | | 5′-VPusCfscAfuCfaAfcA | 240 | |
| | | fuacUfgCfuUfcCfasasa | | |
| 3 | 870496 | 5′-Q339gGfaAfgCfaGfUf | 241 | 0.2795 |
| | | AfuGfuUfgAfuGfgAfL96 | | |
| | | 5′-VPusCfscAfuCfaAfcA | 242 | |
| | | fuacUfgCfuUfcCfasasa | | |
| 4 | 870497 | 5′-Q339gsGfaAfgCfaGfU | 243 | 0.3168 |
| | | fAfuGfuUfgAfuGfgAfL96 | | |
| | | 5′-VPusCfscAfuCfaAfcA | 244 | |
| | | fuacUfgCfuUfcCfasasa | | |
| 5 | 870498 | 5′-Q339sgsGfaAfgCfaGf | 245 | 1.6 |
| | | UfAfuGfuUfgAfuGfgAfL | | |
| | | 96 | | |
| | | 5′-usCfscAfuCfaAfcAfu | 246 | |
| | | acUfgCfuUfcCfasasa | | |
| 6 | 870499 | 5′-Q339sgsGfaAfgCfaGf | 247 | 0.163 |
| | | UfAfuGfuUfgAfuGfgAfL | | |
| | | 96 | | |
| | | 5′-VPusCfscAfuCfaAfcA | 248 | |
| | | fuacUfgCfuUfcCfasasa | | |
| 7 | 870500 | 5′-Q339sgGfaAfgCfaGfU | 249 | 0.086 |
| | | fAfuGfuUfgAfuGfgAfL96 | | |
| | | 5′-VPusCfscAfuCfaAfcA | 250 | |
| | | fuacUfgCfuUfcCfasasa | | |

Structure of Q339 is shown in FIG. 33.

[1420] As seen from the data summarized in Table 17, in vitro activity showed activity comparable in all cases. It is noteworthy that in vitro activity is recorded over very small period (one day) compared to in vivo RNAi activity. Interestingly, positive influence of morpolino monomer was visible only at day 7. Morpholino ring in addition to blocking the loading of sense strand also increase metabolic stability of the siRNA duplex. This can keep siRNA longer in the circulation and allow its slow release from endosomes. Thus, greater amounts of siRNA is available over longer period of time.

TABLE 17
IC₅₀ data on the on-target activity in
luciferase reporter assay for duplexes
that target ApoB

| Duplx | Alny | | | | |
|---|---|---|---|---|---|
| # | # | | | | IC50 |
| 1 | AD- | sense | UfsgsUfgAfc | 312 | 0.3767 |
| | 63716 | | AfaAfUfAfuG | | |
| | | | fgGfcAfuCfa | | |
| | | | AfL96 | | |
| | | antis | usUfsgAfuGf | 313 | |
| | | | cCfcAfuauUf | | |
| | | | uGfuCfaCfas | | |
| | | | asa | | |
| 2 | AD- | sense | UfsgsUfgAfc | 314 | 01634 |
| | 64559 | | AfaAfUfAfuG | | |
| | | | fgGfcAfuCfa | | |
| | | | AfL96 | | |
| | | antis | VPusUfsgAfu | 315 | |
| | | | GfcCfcAfuau | | |
| | | | UfuGfuCfaCf | | |
| | | | asasa | | |
| 3 | AD- | sense | Q339gsUfgAf | 316 | 0.2186 |
| | 870463 | | cAfaAfUfAfu | | |
| | | | GfgGfcAfuCf | | |
| | | | aAfL96 | | |
| | | antis | VPusUfsgAfu | 317 | |
| | | | GfcCfcAfuau | | |
| | | | UfuGfuCfaCf | | |
| | | | asasa | | |
| 4 | AD- | sense | Q339sgsUfgA | 318 | 0.3593 |
| | 870464 | | fcAfaAfUfAf | | |
| | | | uGfgGfcAfuC | | |
| | | | faAfL96 | | |
| | | antis | VPusUfsgAfu | 319 | |
| | | | GfcCfcAfuau | | |
| | | | UfuGfuCfaCf | | |
| | | | asasa | | |
| 5 | AD- | sense | Q339sgsUfgA | 320 | 0.6511 |
| | 870465 | | fcAfaAfUfAf | | |
| | | | uGfgGfcAfuC | | |
| | | | faAfL96 | | |
| | | antis | usUfsgAfuGf | 321 | |
| | | | cCfcAfuauUf | | |
| | | | uGfuCfaCfas | | |
| | | | asa | | |
| 6 | AD-8 | sense | Q339gUfgAfc | 322 | 0.251 |
| | 70466 | | AfaAfUfAfuG | | |
| | | | fgGfcAfuCfa | | |
| | | | AfL96 | | |
| | | antis | VPusUfsgAfu | 323 | |
| | | | GfcCfcAfuau | | |
| | | | UfuGfuCfaCf | | |
| | | | asasa | | |
| 7 | AD- | sense | Q339sgUfgAf | 324 | 02325 |
| | 870467 | | cAfaAfUfAfu | | |
| | | | GfgGfcAfuCf | | |
| | | | aAfL96 | | |
| | | antis | VPusUfsgAfu | 325 | |
| | | | GfcCfcAfuau | | |
| | | | UfuGfuCfaCf | | |
| | | | asasa | | |

TABLE 18
Additional exemplary duplexes that
target TTR

| | | SEQ | | | | |
|---|---|---|---|---|---|---|
| | Sequence | ID | Tar- | | Strand | Duplex |
| | (5′-3′) | NO. | get | | ID | ID |
| si-1 | a•a•cagu | 251 | TTR | S | A- | AD- |
| | GuUCUugc | | | | 128009 | 64958 |
| | ucuauaaL | | | | | |
| | u•U•auaG | 252 | | AS | A- | |
| | agcaagaA | | | | 126312 | |
| | cAcuguu• | | | | | |
| | u•u | | | | | |
| si-2 | a•a•cagu | 253 | TTR | S | A- | AD- |
| | GuUCUugc | | | | 128009 | 1479278 |
| | ucuauaaL | | | | | |
| | Mo2•U•au | 254 | | AS | A- | |
| | aGagcaag | | | | 2600326 | |
| | aAcAcugu | | | | | |
| | u•u•u | | | | | |
| si-3 | a•a•cagu | 255 | TTR | S | A- | |
| | GuUCUugc | | | | 128009 | |
| | ucuauaaL | | | | | |
| | Mo2•u•au | 256 | | AS | A- | |
| | aGagcaag | | | | 3831223 | |
| | aAcAcugu | | | | | |
| | u•u•u | | | | | |
| si-4 | a•a•cagu | 257 | TTR | S | A- | |
| | GuUCUugc | | | | 128009 | |
| | ucuauaaL | | | | | |
| | u•u•auaG | \|258 | | AS | A- | |
| | agcaagaA | | | | 137474 | |
| | cAcuguu• | | | | | |
| | u•u | | | | | |

Structure of Mo1, Mo2, and L are shown in FIG. 33.

TABLE 19
SEQ ID NOs for sequences shown in FIGS. 19, 20 and

| | | | SEQ |
|---|---|---|---|
| | | | ID |
| | | | NO |
| For Figure 19 | | | |
| AD- | sense | AfsasCfaGfuGfuUfCfUfuGf | 260 |
| 77197 | | cUfcUfaUfsasAf | |
| | antis | usUfsaUfaGfaGfcAfagaAfc | 261 |
| | | AfcUfgUfususuL96 | |
| AD- | sense | AfsasCfaGfuGfuUfCfUfuGf | 262 |
| 77836 | | cUfcUfaUfaAf | |
| | | Q197L245 | |
| | antis | usUfsaUfaGfaGfcAfagaAfc | 263 |
| | | AfcUfgUfususuL96 | |
| AD- | sense | AfsasCfaGfuGfuUfCfUfuGf | 264 |
| 77837 | | cUfcUfaUfaAf | |
| | | Q197Q197L245 | |
| | antis | usUfsaUfaGfaGfcAfagaAfc | 265 |
| | | AfcUfgUfususuL96 | |
| AD- | sense | AfsasCfaGfuGfuUfCfUfuGf | 266 |
| 77197 | | cUfcUfaUfsasAf | |
| | antis | usUfsaUfaGfaGfcAfagaAfc | 267 |
| | | AfcUfgUfususuL96 | |
| AD- | sense | AfsasCfaGfuGfuUfCfUfuGf | 268 |
| 77189 | | cUfcUfaUfaAfL245 | |
| | antis | usUfsaUfaGfaGfcAfagaAfc | 269 |
| | | AfcUfgUfususuL96 | |
| AD- | sense | AfsasCfaGfuGfuUfCfUfuGf | 270 |
| 77836 | | cUfcUfaUfaAf | |
| | | Q197L245 | |
| | antis | usUfsaUfaGfaGfcAfagaAfc | 271 |
| | | AfcUfgUfususuL96 | |
| AD- | sense | AfsasCfaGfuGfuUfCfUfuGf | 272 |
| 77837 | | cUfcUfaUfaAf | |
| | | Q197Q197L245 | |
| | antis | usUfsaUfaGfaGfcAfagaAfc | 273 |
| | | AfcUfgUfususuL96 | |
| For Figure 20 | | | |
| AD-7 | sense | UfsasCfuGfuUfgGfAfUfuGf | 274 |
| 5802 | | aUfuCfgAfaAfL245 | |
| | antis | VPusUfsuCfgAfaUfcAfaucC | 275 |
| | | faAfcAfgUfasgsc | |
| AD- | sense | UfsasCfuGfuUfgGfAfUfuGf | 276 |
| 75803 | | aUfuCfgAfaAf | |
| | | Q197L245 | |
| | antis | VPusUfsuCfgAfaUfcAfaucC | 277 |
| | | faAfcAfgUfasgsc | |
| AD- | sense | UfsasCfuGfuUfgGfAfUfuGf | 278 |
| 75804 | | aUfuCfgAfaAf | |
| | | Q197Q197L245 | |
| | antis | VPusUfsuCfgAfaUfcAfaucC | 279 |
| | | faAfcAfgUfasgsc | |
| AD- | sense | UfsasCfuGfuUfgGfAfUfuGf | 280 |
| 64919 | | aUfuCfgAfaAfL10 | |
| | antis | VPusUfsuCfgAfaUfcAfaucC | 281 |
| | | faAfcAfgUfasgsc | |
| For Figure 43 | | | |
| AD- | sense | (Alns)asCfaGfuGfuUfCfUf | 326 |
| 805623 | | uGfcUfcUfaUfaAfL96 | |
| | antis | VPusUfsaUfaGfaGfcAfagaA | 327 |
| | | fcAfcUfgUfususu | |
| AD- | sense | (Aln)asCfaGfuGfuUfCfUfu | 328 |
| 805621 | | GfcUfcUfaUfaAfL96 | |
| | antis | VPusUfsaUfaGfaGfcAfagaA | 329 |
| | | fcAfcUfgUfususu | |
| AD- | sense | (Aln)aCfaGfuGfuUfCfUfuG | 330 |
| 805622 | | fcUfcUfaUfaAfL96 | |
| | antis | VPusUfsaUfaGfaGfcAfagaA | 331 |
| | | fcAfcUfgUfususu | |
| AD- | sense | (Alns)aCfaGfuGfuUfCfUfu | 332 |
| 805620 | | GfcUfcUfaUfaAfL96 | |
| | antis | VPusUfsaUfaGfaGfcAfcAfc | 333 |
| | | UfgUfususu | |

TABLE 20
Abbreviations used in sequences

| | |
|---|---|
| Af | 2′-deoxy-2′-fluoroadenosine-3′-phosphate |
| Afs | 2′-deoxy-2′-fluoroadenosine-3′-phosphorothioate |
| Cf | 2′-deoxy-2′-fluorocytidine-3′-phosphate |
| Cfs | 2′-deoxy-2′-fluorocytidine-3′-phosphorothioate |
| Gf | 2′-deoxy-2′-fluoroguanosine-3′-phosphate |
| Gfs | 2′-deoxy-2′-fluoroguanosine-3′-phosphorothioate |
| Uf | 2′-deoxy-2′-fluorouridine-3′-phosphate |
| Ufs | 2′-deoxy-2′-fluorouridine-3′-phosphorothioate |
| a | 2′-O-methyladenosine-3′-phosphate |
| as | 2′-O-methyladenosine-3′-phosphorothioate |
| c | 2′-O-methylcytidine-3′-phosphate |
| cs | 2′-O-methylcytidine-3′-phosphorothioate |
| g | 2′-O-methylguanosine-3′-phosphate |
| gs | 2′-O-methylguanosine-3′-phosphorothioate |
| t | 2′-O-methyl-5-methyluridine-3′-phosphate |
| ts | 2′-O-methyl-5-methyluridine-3′-phosphorothioate |
| u | 2′-O-methyluridine-3′-phosphate |
| us | 2′-O-methyluridine-3′-phosphorothioate |
| dA | 2′-deoxyadenosine-3′-phosphate (Deoxy-Adenosine) |
| dAs | 2′-deoxyadenosine-3′-phosphorothioate |
| dC | 2′-deoxycytidine-3′-phosphate (Deoxy-Cytidine) |
| dCs | 2′-deoxycytidine-3′-phosphorothioate |
| dG | 2′-deoxyguanosine-3′-phosphate (Deoxy-Guanosine) |
| dG | 2′-deoxyguanosine-3′-phosphorothioate |
| dT | 2′-deoxythymidine-3′-phosphate (Deoxy-Thymidine) |
| dTs | 2′-deoxythymidine-3′-phosphorothioate |
| VP | 5′-E-vinylphosphonate |
| s | Phosphorothioate linkage- indicates modification of 3′-phosphate for 3′- |
| | phosphorothioate on the preceding nucleotide |
| “•” symbol | Phosphorothioate linkages- indicates modification of 3′-phosphate for 3′- |
| | phosphorothioate on the preceding nucleotide |
| L96 | (2S,4R)-1-[29-[[2-(acetylamino)-2-deoxy-β-D-galactopyranosyl]oxy]-14,14- |
| | bis[[3-[[3-[[5-[[2-(acetylamino)-2-deoxy-β-D-galactopyranosyl]oxy]-1- |
| | oxopentyl]amino]propyl]amino]-3-oxopropoxy]methyl]-1,12,19,25-tetraoxo- |
| | 16-oxa-13,20,24-triazanonacos-1-yl]-4-hydroxy-2-hydroxymethylpyrrolidine |
| | [chemical structure] |
| uL96 | 2′-O-methyluridine-3′-phosphate ((2S,4R)-1-[29-[[2-(acetylamino)-2-deoxy-β- |
| | D-galactopyranosyl]oxy]-14,14-bis[[3-[[3-[[5-[[2-(acetylamino)-2-deoxy-β-D- |
| | galactopyranosyl]oxy]-1-oxopentyl]amino]propyl]amino]-3- |
| | oxopropoxy]methyl]-1,12,19,25-tetraoxo-16-oxa-13,20,24-triazanonacos-1- |
| | yl]-4-hydroxy-3-pyrrolidinyl)methyl ester |
| | [chemical structure] |
| aL96 | 2′-O-methyladenosine-3′-phosphate ((2S,4R)-1-[29-[[2-(acetylamino)-2- |
| | deoxy-β-D-galactopyranosyl]oxy]-14,14-bis[[3-[[3-[[5-[[2-(acetylamino)-2- |
| | deoxy-β-D-galactopyranosyl]oxy]-1-oxopentyl]amino]propyl]amino]-3- |
| | oxopropoxy]methyl]-1,12,19,25-tetraoxo-16-oxa-13,20,24-triazanonacos-1- |
| | yl]-4-hydroxy-2-pyrrolidinyl)methyl ester |
| cL96 | 2′-O-methylcytidine-3′-phosphate ((2S,4R)-1-[29-[[2-(acetylamino)-2-deoxy- |
| | β-D-galactopyranosyl]oxy]-14,14-bis[[3-[[3-[[5-[[2-(acetylamino)-2-deoxy-β- |
| | D-galactopyranosyl]oxy]-1-oxopentyl]amino]propyl]amino]-3- |
| | oxopropoxy]methyl]-1,12,19,25-tetraoxo-16-oxa-13,20,24-triazanonacos-1- |
| | yl]-4-hydroxy-2-pyrrolidinyl)methyl ester |
| gL96 | 2′-O-methylguanosine-3′-phosphate ((2S,4R)-1-[29-[[2-(acetylamino)-2- |
| | deoxy-β-D-galactopyranosyl]oxy]-14,14-bis[[3-[[3-[[5-[[2-(acetylamino)-2- |
| | deoxy-β-D-galactopyranosyl]oxy]-1-oxopentyl]amino]propyl]amino]-3- |
| | oxopropoxy]methyl]-1,12,19,25-tetraoxo-16-oxa-13,20,24-triazanonacos-1- |
| | yl]-4-hydroxy-2-pyrrolidinyl)methyl ester |
| AfL96 | 2′-deoxy-2′-fluoroadenosine-3′-phosphate ((2S,4R)-1-[29-[[2-(acetylamino)- |
| | 2-deoxy-β-D-galactopyranosyl]oxy]-14,14-bis[[3-[[3-[[5-[[2-(acetylamino)-2- |
| | deoxy-β-D-galactopyranosyl]oxy]-1-oxopentyl]amino]propyl]amino]-3- |
| | oxopropoxy]methyl]-1,12,19,25-tetraoxo-16-oxa-13,20,24-triazanonacos-1- |
| | yl]-4-hydroxy-2-pyrrolidinyl)methyl ester |
| CfL96 | 2′-deoxy-2′-fluorocytidine-3′-phosphate ((2S,4R)-1-[29-[[2-(acetylamino)-2- |
| | deoxy-β-D-galactopyranosyl]oxy]-14,14-bis[[3-[[3-[[5-[[2-(acetylamino)-2- |
| | deoxy-β-D-galactopyranosyl]oxy]-1-oxopentyl]amino]propyl]amino]-3- |
| | oxopropoxy]methyl]-1,12,19,25-tetraoxo-16-oxa-13,20,24-triazanonacos-1- |
| | yl]-4-hydroxy-2-pyrrolidinyl)methyl ester |
| GfL96 | 2′-deoxy-2′-fluoroguanosine-3′-phosphate ((2S,4R)-1-[29-[[2-(acetylamino)- |
| | 2-deoxy-β-D-galactopyranosyl]oxy]-14,14-bis[[3-[[3-[[5-[[2-(acetylamino)-2- |
| | deoxy-β-D-galactopyranosyl]oxy]-1-oxopentyl]amino]propyl]amino]-3- |
| | oxopropoxy]methyl]-1,12,19,25-tetraoxo-16-oxa-13,20,24-triazanonacos-1- |
| | yl]-4-hydroxy-2-pyrrolidinyl)methyl ester |
| UfL96 | 2′-deoxy-2′-fluorouridine-3′-phosphate ((2S,4R)-1-[29-[[2-(acetylamino)-2- |
| | deoxy-β-D-galactopyranosyl]oxy]-14,14-bis[[3-[[3-[[5-[[2-(acetylamino)-2- |
| | deoxy-β-D-galactopyranosyl]oxy]-1-oxopentyl]amino]propyl]amino]-3- |
| | oxopropoxy]methyl]-1,12,19,25-tetraoxo-16-oxa-13,20,24-triazanonacos-1- |
| | yl]-4-hydroxy-2-pyrrolidinyl)methyl ester |
| dTL96 | 2′-deoxythymidine-3′-phosphate ((2S,4R)-1-[29-[[2-(acetylamino)-2-deoxy- |
| | β-D-galactopyranosyl]oxy]-14,14-bis[[3-[[3-[[5-[[2-(acetylamino)-2-deoxy-β- |
| | D-galactopyranosyl]oxy]-1-oxopentyl]amino]propyl]amino]-3- |
| | oxopropoxy]methyl]-1,12,19,25-tetraoxo-16-oxa-13,20,24-triazanonacos-1- |
| | yl]-4-hydroxy-2-pyrrolidinyl)methyl ester |
| (Tgn) | Thymidine-glycol nucleic acid (GNA) S-Isomer |
| | [chemical structure] |
| Q339 | 5′-deoxy-5′-(N-morpholinyl)-2′-O,4′-C-methylene uridine-3′-phosphate |
| | [chemical structure] |
| Q339s | 5′-deoxy-5′-(N-morpholinyl)-2′-O,4′-C-methylene uridine-3′-phosphorothioate |
| | [chemical structure] |
| Q340 | 5′-deoxy-5′-(N-morpholinyl)-2′-O,4′-C-methylene adenosine-3′-phosphate |
| | [chemical structure] |
| Q340s | 5′-deoxy-5′-(N-morpholinyl)-2′-O,4′-C-methylene adenosine-3′- |
| | phosphorothioate |
| | [chemical structure] |
| (Aln) | 2′-O,4′-C-methylene adenosine-3′-phosphate |
| | [chemical structure] |
| (Alns) | 2′-O,4′-C-methylene adenosine-3′-phosphorothioate |
| | [chemical structure] |
| Q197 | (2S,4R)-2-(hydroxymethyl)-1-(6-((S)-2-(4- |
| | isobutylphenyl)propanamido)hexanoyl)pyrrolidin-4-yl phosphate |
| | [chemical structure] |
| L245 | (N-(6-((2S-(4-(2-methylpropyl)phenyl)-propan-1-oyl)amino)hexan-1-oyl)-4R- |
| | hydroxypyrrolidin-2S-yl)methanol |
| | [chemical structure] |
| L10 | (N-(1-oxo-6-((3beta-cholest-5-en-3-yl)oxcarboxamido)hexyl)-4R- |
| | hydroxypyrrolidin-2S-yl)methanol |
| | [chemical structure] |
| Q197L245 | (4R-((((4R-(hydroxy)-1-(6-((S)-2-(4- |
| | isobutylphenyl)propanamido)hexanoyl)pyrrolidin-2S- |
| | yl)methoxy)hydroxyphosphoryl)oxy)-1-(6-((S)-2-(4- |
| | isobutylphenyl)propanamido)hexanoyl)pyrrolidin-2S-yl)methanol |
| | [chemical structure] |
| Q197Q197L245 | (4R-((((4R-((((4R-hydroxy-1-(6-((S)-2-(4- |
| | isobutylphenyl)propanamido)hexanoyl)pyrrolidin-2S- |
| | yl)methoxy)hydroxyphosphoryl)oxy)-1-(6-((S)-2-(4- |
| | isobutylphenyl)propanamido)hexanoyl)pyrrolidin-2S- |
| | yl)methoxy)hydroxyphosphoryl)oxy)-1-(6-((S)-2-(4- |
| | isobutylphenyl)propanamido)hexanoyl)pyrrolidin-2S-yl)methanol |
| | [chemical structure] |

*3′-terminal nucleotides are 3′-OH unless conjugated to (L) or otherwise indicated

[1421] All patents and other publications; including literature references, issued patents, published patent applications, and co-pending patent applications; cited throughout this application are expressly incorporated herein by reference for the purpose of describing and disclosing, for example, the methodologies described in such publications that might be used in connection with the technology described herein. These publications are provided solely for their disclosure prior to the filing date of the present application. Nothing in this regard should be construed as an admission that the inventors are not entitled to antedate such disclosure by virtue of prior invention or for any other reason. All statements as to the date or representation as to the contents of these documents is based on the information available to the applicants and does not constitute any admission as to the correctness of the dates or contents of these documents.

What is claimed is:

1. A double-stranded RNA (dsRNA) comprising an antisense strand and a sense strand complementary to the antisense strand, wherein the antisense strand comprises at its 3′-end a first ligand, wherein the antisense strand comprises at least one nuclease resistant modification at its 3′-end and at least one nuclease resistant modification at its 5′-end, and wherein the dsRNA has a double-stranded region of at least about 15 base-pairs.

2. The dsRNA of claim 1, wherein the sense strand comprises at least one nuclease resistant modification at its 5′-end, optionally, the sense strand comprises at least one nuclease resistant modification at its 3′-end and at least one nuclease resistant modification at its 5′-end.

3. The dsRNA of claim 1, wherein the at least one nuclease resistant modification is a modified internucleoside linkage, a modified sugar moiety or a modified nucleobase, optionally, the at least one nuclease resistant modification is a phosphorothioate internucleoside linkage, a phosphorodithioate internucleoside linkage, a 2′-5′-linked nucleotide, or a L-nucleotide.

4. The dsRNA of claim 1, wherein the antisense strand comprises at least two, e.g., three, four, five, six or more phosphorothioate internucleoside linkages, optionally,
a. the antisense strand comprises a phosphorothioate internucleoside linkage between nucleotide positions 1 and 2, counting from the 3′-end of the antisense strand, and a phosphorothioate internucleoside linkage between nucleotide positions 1 and 2, counting from the 5′-end of the antisense strand;
b. the antisense strand comprises a phosphorothioate internucleoside linkage between positions 1 and 2, and between positions 2 and 3, counting from the 3′-end of the strand, and a phosphorothioate internucleoside linkage between positions 1 and 2, and between positions 2 and 3, counting from the 5′-end of the strand;
c. the antisense strand comprises a phosphorothioate internucleoside linkage between positions 1 and 2, between positions 2 and 3, and between positions 3 and 4, counting from the 3′-end of the strand, and a phosphorothioate internucleoside linkage between positions 1 and 2, counting from the 5′-end of the strand;
d. wherein the antisense strand comprises a phosphorothioate internucleoside linkage between positions 1 and 2, counting from the 3′-end of the strand, and a phosphorothioate internucleoside linkage between positions 1 and 2, and between positions 2 and 3, counting from the 5′-end of the strand; or
e. the antisense strand comprises a phosphorothioate internucleoside linkage between positions 1 and 2, counting from the 3′-end of the strand, and a phosphorothioate internucleoside linkage between positions 1 and 2, between positions 2 and 3, and between positions 3 and 4, counting from the 5′-end of the strand.

5. The dsRNA of claim 1, wherein the sense strand comprises at least one, e.g., two, three, four or more phosphorothioate internucleoside linkages, optionally,
a. the sense strand comprises a phosphorothioate internucleoside linkage between positions 1 and 2, counting from 5′-end of the strand;
b. the sense strand comprises a phosphorothioate internucleoside linkage between positions 1 and 2, counting from 5′-end of the strand, and between positions 1 and 2, counting from 3′-end of the strand;
c. the sense strand comprises a phosphorothioate internucleoside linkage between positions 1 and 2, and between positions 2 and 3, counting from 5′-end of the strand; or
d. the sense strand comprises a phosphorothioate internucleoside linkage between positions 1 and 2, and between positions 2 and 3, counting from 5′-end of the strand, and between positions 1 and 2, and between positions 2 and 3, counting from 3′-end of the strand.

6. The dsRNA of claim 1, wherein the first ligand is linked to 3′-hydroxyl of the nucleotide at position 1, counting from 3′-end of the antisense strand.

7. The dsRNA of claim 1, wherein the first ligand is linked to the 3′-end of the antisense strand via a linker, optionally, the linker is a hydrophobic linker or hydrophilic linker (e.g., polyethyleneglycol, such as —(CH₂CH₂O)_{w}—, where w is an integer, optionally w is an integer between 1 to 1000, e.g., an integer between 2 and 500).

8. The dsRNA of claim 6, where the linker is linked to the 3′-end of the antisense strand via a phosphodiester or phosphorothioate internucleoside linkage.

9. The dsRNA of claim 7 or 8, wherein the linker is from about 5 Angstroms to about 250 Angstroms in length and/or the linker has a chain length of at least 6 atoms.

10. The dsRNA of any one of claims 7-9, wherein the linker comprises a hydrophobic carrier connected to a carrier, optionally, the carrier comprises a hydrogen-bonding acceptor, optionally, the carrier comprises a pyrrolidine ring.

11. The dsRNA of claim 1, wherein the antisense strand is at least about 17 nucleotides in length, optionally, the antisense strand is about 19, about 20, about 21, about 22, about 23, about 24, about 25 or about 26 nucleotides in length, preferably the antisense strand is about 22, about 23 or about 25 nucleotides in length.

12. The dsRNA of claim 1, wherein the sense strand is at least about 15 nucleotides in length, optionally, the sense strand is about 19, about 20, about 21, about 22, about 23, about 24 or about 25 nucleotides in length, preferably the sense strand is about 21 nucleotides in length.

13. The dsRNA of claim 1, wherein:
(a) the sense strand is 15 nucleotides in length and the antisense strand is 18, 19, 20, 21, or 22 (e.g., 20) nucleotides in length;
(b) the sense strand is 19 nucleotides in length and the antisense strand is 19, 20, or 21 nucleotides in length;
(c) the sense strand is 20 nucleotides in length and the antisense strand is 20, 21, or 22 nucleotides in length;
(d) the sense strand is 21 nucleotides in length and the antisense strand is 21, 22, or 23 nucleotides in length; or
(e) the sense strand is 20-24 (e.g., 22) nucleotides in length and the antisense strand is 34-38 (e.g., 36) nucleotides in length.

14. The dsRNA of claim 1, wherein the dsRNA has a double-stranded region of at least about 15 base-pairs, optionally, the dsRNA has a double-stranded region of about 16, about 17, about 18, about 19, about 20, about 21, about 22, about 23, about 24, about 25 or more base-pairs, preferably, the dsRNA has a double-stranded region of about 21 base-pairs.

15. The dsRNA of claim 1, wherein the sense strand is about 21 nucleotides in length and the antisense strand is about 21, about 22, about 23, about 24 or about 25 nucleotides in length, and wherein the dsRNA comprises a double-stranded region of at least 18, e.g., 19, 20 or 21 base-pairs.

16. The dsRNA of any one of the preceding claims, wherein the dsRNA comprises at least one single-stranded overhang comprising 1-5 nucleotides (e.g., 1 or 2 nucleotides), optionally, the antisense strand comprises a single-stranded overhang at its 3′-end.

17. The dsRNA of claim 1, wherein the dsRNA comprises at least one blunt-end, optionally, the antisense strand comprises a blunt end at its 5′-end.

18. The dsRNA of claim 16 or 17, wherein the antisense strand comprises at least one nuclease resistant modification in the single-stranded overhang, and/or the antisense strand comprises at least one phosphorothioate internucleoside linkage in the single-stranded overhang.

19. The dsRNA of claim 1, wherein the ligand comprises GalNAc.

20. The dsRNA of any one of the preceding claims, wherein the ligand is [chemical structure] [chemical structure] [chemical structure] [chemical structure] [chemical structure]
optionally the first ligand is

[chemical structure]

21. The dsRNA of any one of the preceding claims, wherein the dsRNA comprises a second ligand, optionally, the second ligand is linked to the sense strand.

22. The dsRNA of claim 21, wherein the second ligand is a PK modulator, a targeting ligand or an endosomolytic ligand, optionally, the second ligand is a PK modulator.

23. The dsRNA of any one of claims 21-22, wherein the second ligand binds a serum protein, e.g., serum albumin.

24. The dsRNA of any one of claims 21-23, wherein the second ligand comprises iodipamide, azapropazone, indomethacin, tiblone (TIB), 3-carboxy-4-methyl-5-propyl-2-furanpropanoic acid (CMPF), DIS, oxyphenbutazone, phenylbutazone, warfarin, indoxyl sulfate, diflunisal, halothane, ibuprofen, diazepam, propofol, or any combination thereof, optionally the second ligand comprises ibuprofen.

25. The dsRNA of any one of claims 21-24, wherein the first ligand comprises GalNac and the second ligand comprises ibuprofen, or the first ligand is GalNAc and the second ligand is a mannose receptor targeting ligand (e.g., multivalent mannose), or the first ligand is GalNAc and the second ligand is a folic acid ligand.

26. The dsRNA of any one of claims 21-25, wherein the dsRNA comprises at least one, e.g., 2, 3, 4, 5, 6, 7, 8, 9, 10 or more 2′-fluoro nucleotide.

27. The dsRNA of any one of claims 21-26, wherein the antisense strand comprises at least one, e.g., 2, 3, 4, 5 or more 2′-fluoro nucleotides, optionally
a. the antisense strand comprises a 2′-fluoro nucleotide at positions 2, 14 and 16, counting from the 5′-end of the antisense strand;
b. the antisense strand comprises a 2′-fluoro nucleotide at positions 2, 6, 14 and 16, counting from the 5′-end of the antisense strand;
c. the antisense strand comprises a 2′-fluoro nucleotide at positions 2, 6, 9, 14 and 16, counting from the 5′-end of the antisense strand; or
d. the antisense strand comprises a 2′-fluoro nucleotide at positions 2, 6, 8, 9, 14 and 16, counting from the 5′-end of the antisense strand.

28. The dsRNA of any one of claims 21-27, wherein the antisense strand comprises at least one, e.g., 2, 3, 4, 5 or more 2′-fluoro nucleotides, optionally
a. the sense strand comprises a 2′-fluoro nucleotide at positions 7, 9 and 11, counting from the 5′-end of the sense strand or at positions 11, 13 and 15, counting from the 3′-end of the sense strand;
b. the sense strand comprises a 2′-fluoro nucleotide at positions 7, 9, 10 and 11, counting from the 5′-end of the sense strand or at positions 11, 12, 13 and 15, counting from the 3′-end of the sense strand; or
c. the sense strand comprises a 2′-fluoro nucleotide at positions 9, 10, and 11, counting from the 5′-end of the sense strand or at positions 11, 12, and 13 counting from the 3′-end of the sense strand.

29. The dsRNA of any one of claims 21-28, wherein the antisense strand comprises at least one, e.g., 2, 3, 4, 5, 6, 7 or more DNA nucleotides, optionally
a. the antisense strand comprises a DNA nucleotide at positions 2, 5, 7, and 12, counting from the 5′-end of the antise8se strand, optionally the antisense strand further comprises a 2′-fluoro nucleotide at position 14, counting from of the 5-end of the antisense strand;
b. wherein the antisense strand comprises a DNA nucleotide at positions 2, 5, 7, 12, and 14 counting from the 5′-end of the antisense strand; or
c. the antisense strand comprises a DNA nucleotide at positions 2, 5, 7, 12, 14 and 16 counting from the 5′-end of the antisense strand.

30. The dsRNA of any one of claims 21-29, wherein the antisense strand comprises at least one 2′-OMe nucleotide, optionally, all remaining nucleotides in the antisense strand are 2′-OMe nucleotides.

31. The dsRNA of any one of claims 21-30, wherein the sense strand comprises at least one 2′-OMe nucleotide, optionally, all remaining nucleotides in the sense strand are 2′-OMe nucleotides.

32. The dsRNA of any one of claims 21-31, wherein the antisense strand comprises a phosphate group or a phosphate analog or derivative thereof at its 5′-end, optionally, the antisense strand comprises a vinylphosphonate (e.g., E-vinylphosphonate) group at its 5′-end.

33. The dsRNA of any one of claims 21-32, wherein:
a. the antisense strand comprises at least one, e.g., 2, 3, 4, 5 or more LNA or BNA nucleotides;
b. the sense strand comprises at least one, e.g., 2, 3, 4, 5 or more LNA or BNA nucleotides;
c. the antisense strand comprises at least one, e.g., 2, 3, 4, 5 or more CeNA nucleotides.
d. the antisense strand comprises at least one, e.g., 2, 3, 4, 5 or more thermally stabilizing modifications;
e. the sense strand comprises at least one, e.g., 2, 3, 4, 5 or more thermally stabilizing modifications;
f. the antisense strand comprises at least one, e.g., 2, 3, 4, 5 or more abasic nucleotides;
g. the sense strand comprises at least one, e.g., 2, 3, 4, 5 or more abasic nucleotides;
h. the antisense strand comprises at least one, e.g., 2, 3, 4, 5 or more 2′-deoxy nucleotides;
i. the sense strand comprises at least one, e.g., 2, 3, 4, 5 or more 2′-deoxy nucleotides;
j. the antisense strand comprises at least one, e.g., 2, 3, 4, 5 or more acyclic (e.g., unlocked nucleic acid (UNA) or glycol nucleic acid (GNA)) nucleotides;
k. the sense strand comprises at least one, e.g., 2, 3, 4, 5 or more acyclic (e.g., unlocked nucleic acid (UNA) or glycol nucleic acid (GNA)) nucleotides; and/or
l. the antisense strand comprises at least one thermally destabilizing modification, optionally, the antisense strand comprises at least one thermally destabilizing modification in the seed region (i.e., positions 2-9, e.g., position 6, 7, or 8, counting from the 5′-end) of the antisense strand, optionally, the thermally destabilizing modification is an abasic nucleotide, 2′-deoxy nucleotides, acyclic nucleotide (e.g., unlocked nucleic acid (UNA), glycol nucleic acid (GNA) or(S)-glycol nucleic acid (S-GNA)), a 2′-5′ linked nucleotide (3′-RNA), threose nucleotide (TNA), 2′ gem Me/F nucleotide, or mismatch with an opposing nucleotide in the other strand.

34. A compound of Formula (I): [chemical structure]
wherein:
B an optionally modified nucleobase;
X^{S} is O, CH₂, S, or NH;
R² is hydroxyl, protected hydroxyl, halogen, optionally substituted C₁₋₃₀ alkoxy (e.g., methoxy, 2-methoxyethoxy), alkoxyalkyl (e.g., 2-methoxyethyl), hydrogen, optionally substituted C₁₋₃₀ alkyl, optionally substituted C₂₋₃₀alkenyl, optionally substituted C₂₋₃₀alkynyl, alkoxyalkylamine, alkoxyoxycarboxylate, amino, alkylamino, dialkylamino, 5-8 membered heterocyclyl, —O—C₄₋₃₀alkyl-ON(CH₂R⁸)(CH₂R⁹), —O—C₄₋₃₀alkyl-ON(CH₂R⁸)(CH₂R⁹), phosphate group, reactive phosphorous group, a ligand, or a linker covalently bonded to one or more ligands;
R³ is a reactive phosphorous group, hydroxyl, protected hydroxyl, halogen, optionally substituted C₂₋₃₀alkynyl, optionally substituted C₁₋₃₀ alkoxy (e.g., methoxy, 2-methoxyethoxy), alkoxyalkyl (e.g., 2-methoxyethyl), hydrogen, optionally substituted C₁₋₃₀ alkyl, optionally substituted C₂₋₃₀alkenyl, alkoxyalkylamine, alkoxyoxycarboxylate, amino, alkylamino, dialkylamino, 5-8 membered heterocyclyl, —O—C₄₋₃₀alkyl-ON(CH₂R⁸)(CH₂R⁹), —O—C₄₋₃₀alkyl-ON(CH₂R⁸)(CH₂R⁹), phosphate group, a ligand, or a linker covalently bonded to one or more ligands;
R⁴ is hydrogen, optionally substituted C₁₋₆alkyl, optionally substituted C₂₋₆alkenyl, optionally substituted C₂₋₆alkynyl, or optionally substituted C₁₋₆alkoxy;
or R⁴ and R² taken together are 4′-C(R¹⁰R¹¹)ᵥ—Y-2′ or 4′-Y—C(R¹⁰R¹¹)ᵥ-2′;
Y is —O—, —CH₂—, —CH(Me)-, —C(CH₃)₂—, —S—, —N(R¹²)—, —C(O)—, —C(S)—, —S(O)—, —S(O)₂—, —OC(O)—, —C(O)O—, —N(R¹²)C(O)—, or —C(O)N(R¹²)—;
R¹⁰ and R¹¹ independently are H, optionally substituted C₁-C₆alkyl, optionally substituted C₂-C₆alkenyl or optionally substituted C₂-C₆alkynyl;
R¹² is hydrogen, optionally substituted C₁₋₃₀alkyl, optionally substituted C₁-C₃₀alkoxy, C₁₋₄haloalkyl, optionally substituted C₂₋₄alkenyl, optionally substituted C₂-4alkynyl, optionally substituted C₁₋₃₀alkyl-CO₂H, or a nitrogen-protecting group;
v is 1, 2 or 3; and
R⁵ is -L¹-R^{H}, —O—N(R¹³)R¹⁴,
where X^{P} is a phosphate group;
L¹ is a bond, -L³-, C₁₋₃₀alkylene, C₂₋₃₀alkenylene, C₂₋₃₀alkynylene, *-L³-C₁₋₃₀alkylene *-L³-C₂₋₃₀alkenylene, or *-L³-C₂₋₃₀alkynylene;
L³ is —O—, —N(R^{L3})—, —S—, —C(O)—, —S(O)—, —S(O)₂—, —P(X^{L3}) (Y^{L3}R^{L3B})—;
where R^{L3} is hydrogen, optionally substituted C₁₋₃₀alkyl,
optionally substituted C₁-C₃₀alkoxy, C₁₋₄haloalkyl,
optionally substituted C₂₋₄alkenyl, optionally substituted C₂-4alkynyl, optionally substituted C₁₋₃₀alkyl-CO₂H, or a nitrogen-protecting group;
X^{L2} is O or S;
Y^{L3} is O, S, NH, or a bond; and
R^{L3B} is H or optionally substituted alkyl; and
* is bond to R^{H};
and
R^{H} is 4-8 membered heterocyclyl comprising 1, 2 or 3 heteroatoms selected independently from N, O and S, and the heterocyclyl is optionally substituted with 1, 2, 3 or 4 independently selected substituents, and provided that the heterocyclyl comprises at least one nitrogen atom,
or R^{H} is [chemical structure]
where X is O, NR^{L}, S, or CH₂; and R^{L} is hydrogen, a ligand, a linker covalently bonded to one or more ligands, aliphatic and aromatic alkyl, alkylester, alkylamine, dimethylamino alkyl, alkylether, alkylthioether, heteroaromatic alkyl, allyl, vinyl, alkyl groups functionalized with disulfide, oxime, ketone, acetal, hemiacetal, cleavable peptides, or cleavable sugars; and
R¹³ and R¹⁴ are independently -L²-R^{H2} or C₁-C₆alkyl, where:
L² is a linker; and
R^{H2} is 4-8 membered heterocyclyl comprising 1, 2 or 3 heteroatoms selected independently from N, O and S, and the heterocyclyl is optionally substituted with 1, 2, 3 or 4 independently selected substituents, and
provided that at least one of R¹³ and R¹⁴ is -L²-R^{H2}, and
provided that only one of R² and R³ is a reactive phosphorous group; and
R⁵ is not morpholin-4-yl unless R⁴ and R² taken together are 4′-C(R¹⁰R¹¹)ᵥ—Y-2′ or 4′-Y—C(R¹⁰R¹¹)ᵥ-2′.

35. The compound of claim 34, wherein R⁵ is -L¹-R^{H}, optionally, L¹ is L³ or C₁₋₃₀alkylene, optionally, L³ is O.

36. The compound of claim 35, wherein R^{H} is an optionally substituted 6-membered heterocyclyl comprising a nitrogen atom and 0, 1 or 2 additional heteroatoms selected independently from N, O and S, optionally
a. R^{H} is [chemical structure]
where X is O, NR^{L}, S, or CH₂; and R^{L} is hydrogen, a ligand, a linker covalently bonded to one or more ligands, aliphatic and aromatic alkyl, alkylester, alkylamine, dimethylamino alkyl, alkylether, alkylthioether, heteroaromatic alkyl, allyl, vinyl, alkyl groups functionalized with disulfide, oxime, ketone, acetal, hemiacetal, cleavable peptides, or cleavable sugars, optionally, X is O or NR^{L}, optionally R^{L} is hydrogen, a ligand or linker covalently bonded to one or more independently selected ligands;
b. R^{H} [chemical structure]
is optionally, X is O or The compound of claim 123, wherein X is NR^{L}, optionally, R^{L} is hydrogen, a ligand or linker covalently bonded to one or more independently selected ligands.

37. The compound of claim 34, wherein R⁵ is —O—N(R¹³)R¹⁴, optionally, one of R¹³ and R¹⁴ is -L²-R^{H2}, optionally, L² is a bond or an optionally substituted alkylene.

38. The compound of claim 34 or 37, wherein one of R¹³ and R¹⁴ is —(CH₂)ₘ—R^{H2} or [chemical structure]
optionally R^{H2} is an optionally substituted 6-membered heterocyclyl comprising a nitrogen atom and 0, 1 or 2 additional heteroatoms selected independently from N, O and S, optionally
a. R^{H2} is [chemical structure]
where X is O, NR^{L}, S, or CH₂; and R^{L} is hydrogen, a ligand, a linker covalently bonded to one or more ligands, aliphatic and aromatic alkyl, alkylester, alkylamine, dimethylamino alkyl, alkylether, alkylthioether, heteroaromatic alkyl, allyl, vinyl, alkyl groups functionalized with disulfide, oxime, ketone, acetal, hemiacetal, cleavable peptides, or cleavable sugars, optionally, X is O or NR^{L}, optionally, R^{L} is hydrogen, a ligand or linker covalently bonded to one or more independently selected ligands; or
b. R^{H2} is [chemical structure]
where X is O, NR^{L}, S, or CH₂; and R^{L} is hydrogen, a ligand, a linker covalently bonded to one or more ligands, aliphatic and aromatic alkyl, alkylester, alkylamine, dimethylamino alkyl, alkylether, alkylthioether, heteroaromatic alkyl, allyl, vinyl, alkyl groups functionalized with disulfide, oxime, ketone, acetal, hemiacetal, cleavable peptides, or cleavable sugars.

39. The compound of any one of claims 34-38, wherein one of R¹³ and R¹⁴ is an optionally substituted C₁-C₆alkyl, optionally, one of R¹³ and R¹⁴ is methyl.

40. The compound of any one of claims 34-39, wherein X^{S} is O or CH₂, optionally X^{S} is O.

41. The compound of any one of claims 34-40, wherein R³ is a reactive phosphorous group, hydroxyl, or protected hydroxyl, optionally, R³ is a reactive phosphorous group.

42. The compound of any one of claims 34-41, wherein R² is hydroxyl, protected hydroxyl, halogen, optionally substituted C₁₋₃₀ alkoxy (e.g., methoxy, 2-methoxyethoxy), alkoxyalkyl (e.g., 2-methoxyethyl), hydrogen, optionally substituted C₁₋₃₀ alkyl, optionally substituted C₂₋₃₀alkenyl, optionally substituted C₂₋₃₀alkynyl, alkoxyalkylamine, alkoxyoxycarboxylate, amino, alkylamino, dialkylamino, 5-8 membered heterocyclyl, —O—C₄₋₃₀alkyl-ON(CH₂R⁸) (CH₂R⁹), or —O—C₄₋₃₀alkyl-ON(CH₂R⁸) (CH₂R⁹); optionally, R² is hydroxyl, protected hydroxyl, halogen, optionally substituted C₁₋₃₀ alkoxy (e.g., methoxy, 2-methoxyethoxy), alkoxyalkyl (e.g., 2-methoxyethyl), hydrogen, amino, alkylamino, or dialkylamino; optionally, R² is hydrogen, hydroxyl, protected hydroxyl, fluoro, methoxy, ethoxy, or 2-methoxyethoxy; optionally, R² is hydrogen, hydroxyl, protected hydroxyl, fluoro, or methoxy.

43. The compound of any one of claims 34-42, wherein R² and R⁴ taken together are 4′-C(R¹⁰R¹¹)ᵥ—Y-2′ or 4′-Y—C(R¹⁰R¹¹)ᵥ-2′, optionally, R² and R⁴ taken together are 4′-C(R¹⁰R¹¹)ᵥ—Y-2′, wherein v is 1 or 2, optionally one of R¹⁰ and R¹¹ is H and the other is independently H or optionally substituted C₁-C₆alkyl, optionally, R² and R⁴ taken together are 4′-CH₂—O-2′.

44. The compound of any one of claims 34-40, wherein R² is a reactive phosphorous group, hydroxyl, or protected hydroxyl, optionally, R² is a reactive phosphorous group.

45. The compound of claim 44, wherein R³ is hydroxyl, protected hydroxyl, halogen, optionally substituted C₁₋₃₀ alkoxy (e.g., methoxy, 2-methoxyethoxy), alkoxyalkyl (e.g., 2-methoxyethyl), hydrogen, optionally substituted C₁₋₃₀ alkyl, optionally substituted C₂₋₃₀alkenyl, optionally substituted C₂₋₃₀alkynyl, alkoxyalkylamine, alkoxyoxycarboxylate, amino, alkylamino, dialkylamino, 5-8 membered heterocyclyl, —O—C₄₋₃₀alkyl-ON(CH₂R⁸)(CH₂R⁹), or —O—C₄₋₃₀alkyl-ON(CH₂R⁸)(CH₂R⁹); optionally, R³ is hydroxyl, protected hydroxyl, halogen, optionally substituted C₁₋₃₀ alkoxy (e.g., methoxy, 2-methoxyethoxy), alkoxyalkyl (e.g., 2-methoxyethyl), hydrogen, amino, alkylamino, or dialkylamino; optionally, R³ is hydrogen, hydroxyl, protected hydroxyl, fluoro, methoxy, ethoxy, or 2-methoxyethoxy; optionally R³ is hydrogen, hydroxyl, protected hydroxyl, fluoro, or methoxy.

46. The compound of any one of claim 34-42, 44 or 45, wherein R⁴ is H.

47. The compound of claim 34, wherein compound is selected from formulae (I-A)-(I-D): [chemical structure]
wherein:
n is 0 or an integer selected from 1 to 30 (e.g., n is 1, 2, 3, 4, 5, 6, 7, 8, 9, 10, 11, 12, 13, 14, 15, 16, 16, 17, 18, 19, 20, 21, 22, 23, 24, 25, 26, 27, 28, 29 or 30, such as n is 1, 2, 3, 4, 5 or 6, preferably n is 0 or 1);
R² is hydrogen, hydroxyl, protected hydroxyl, halogen, optionally substituted C₁₋₃₀ alkoxy (e.g., methoxy, 2-methoxyethoxy), alkoxyalkyl (e.g., 2-methoxyethyl), amino, alkylamino, or dialkylamino;
R³ is a reactive phosphorous group, hydroxyl, protected hydroxyl or a reactive phosphorous group;
R⁴ is hydrogen or R² and R⁴ taken together are 4′-C(R¹⁰R¹¹)ᵥ—Y-2′ or 4′-Y—C(R¹⁰R¹¹)ᵥ-2′.

48. The compound of claim 47, wherein X^{S} is O.

49. The compound of claim 47 or 48, wherein R³ is a reactive phosphorous group, hydroxyl or protected hydroxyl, optionally, R³ is a reactive phosphorous group (e.g., a phosphoramidite, such as 3′-[(2-cyanoethyl)-(N,N-diisopropyl)]-phosphoramidite, 3′-[(2-cyanoethyl)-(N,N-diisopropyl)]-phosphoramidite, or 3′-[(ß-thiobenzoylethyl)-(1-pyrrolidinyl)]-thiophosphoramidite).

50. The compound of any one of claims 47-49, wherein R² is hydrogen, hydroxyl, protected hydroxyl, halogen, optionally substituted C₁₋₃₀ alkoxy (e.g., methoxy, 2-methoxyethoxy), or alkoxyalkyl (e.g., 2-methoxyethyl), optionally, R² is hydrogen, hydroxyl, protected hydroxyl, fluoro, or methoxy.

51. The compound of any one of claims 47-50, wherein R⁴ is H.

52. The compound of any one of claims 47-50, wherein R² and R⁴ taken together are 4′-C(R¹⁰R¹¹)ᵥ—Y-2′ or 4′-Y—C(R¹⁰R¹¹)ᵥ-2′, optionally, R¹⁰ and R¹¹ is H and the other is independently H or optionally substituted C₁-C₆alkyl, optionally, R² and R⁴ taken together are 4′-CH₂—O-2′.

53. The compound of any one of claims 47-52, wherein one of R¹³ and R¹⁴ is [chemical structure]
and the other of R¹³ and R¹⁴ is C₁-C₆alkyl,

[chemical structure]

54. The compound of any one of claims 34-53, wherein one of R¹³ and R¹⁴ is C₁-C₆alkyl (e.g., methyl).

55. The compound of any one of claims 34-54 wherein X is O, S, CH₂, NH or NR^{L}, optionally, R^{L} is a ligand or linker covalently bonded to one or more independently selected ligands.

56. The compound of claim 34, wherein the compound is of Formula (I-E): [chemical structure]
wherein:
R³ is a reactive phosphorous group, hydroxyl, or protected hydroxyl;
R⁵ is -L¹-R^{H}; and
X^{S}, B, Y, R¹⁰ and R¹¹ are as defined in claim 111.

57. The compound of claim 56, wherein compound is of Formula (I-Ea), (I-E¹) or (I-E²): [chemical structure]
wherein
n is 0 or an integer selected from 1 to 30 (e.g., n is 1, 2, 3, 4, 5, 6, 7, 8, 9, 10, 11, 12, 13, 14, 15, 16, 16, 17, 18, 19, 20, 21, 22, 23, 24, 25, 26, 27, 28, 29 or 30, such as n is 1, 2, 3, 4, 5 or 6, preferably n is 0 or 1);
X is O, NR^{L}, S, or CH₂; and
R^{L} is H, a ligand, a linker covalently bonded to one or more ligands, aliphatic and aromatic alkyl, alkylester, alkylamine, dimethylamino alkyl, alkylether, alkylthioether, heteroaromatic alkyl, allyl, vinyl, alkyl groups functionalized with disulfide, oxime, ketone, acetal, hemiacetal, cleavable peptides, or cleavable sugars, and optionally, the compound is of Formula (I-Eb) or (I-Ec):

[chemical structure]

58. The compound of claim 56 or 57, wherein X is O or CH₂, optionally, X is O.

59. The compound of any one of claims 56-58, wherein Y is O.

60. The compound of any one of claims 56-59, wherein one of R¹⁰ is H and the other is H or C₁₋₆alkyl (e.g., methyl).

61. The compound of any one of claims 56-60, wherein X^{S} is O.

62. The compound of any one of claims 56-61, wherein R³ is a reactive phosphorous group, hydroxyl or protected hydroxyl, optionally, R³ is a reactive phosphorous group (e.g., a phosphoramidite, such as 3′-[(2-cyanoethyl)-(N,N-diisopropyl)]-phosphoramidite, 3′-[(2-cyanoethyl)-(N,N-diisopropyl)]-phosphoramidite, or 3′-[(ß-thiobenzoylethyl)-(1-pyrrolidinyl)]-thiophosphoramidite).

63. The compound of claim 56, wherein the compound is of Formula (I-Ed), (I-Ee), (I-E³) or (I-E⁴): [chemical structure]
where n is 0 or an integer selected from 1 to 30 (e.g., n is 1, 2, 3, 4, 5, 6, 7, 8, 9, 10, 11, 12, 13, 14, 15, 16, 16, 17, 18, 19, 20, 21, 22, 23, 24, 25, 26, 27, 28, 29 or 30, such as n is 1, 2, 3, 4, 5 or 6, preferably n is 0 or 1); and
R^{L} is H, a ligand, a linker covalently bonded to one or more ligands, aliphatic and aromatic alkyl, alkylester, alkylamine, dimethylamino alkyl, alkylether, alkylthioether, heteroaromatic alkyl, allyl, vinyl, alkyl groups functionalized with disulfide, oxime, ketone, acetal, hemiacetal, cleavable peptides, or cleavable sugars, and
optionally, the compound is of Formula (I-Ef) or (I-Eg):

[chemical structure]

64. An oligonucleotide prepared using a compound of any one of claims 34-63.

65. An oligonucleotide comprising at least one nucleoside of Formula (II): [chemical structure]
wherein:
B an optionally modified nucleobase;
X^{S} is O, CH₂, S, or NH;
R²² is hydroxyl, protected hydroxyl, halogen, optionally substituted C₁₋₃₀ alkoxy (e.g., methoxy, 2-methoxyethoxy), alkoxyalkyl (e.g., 2-methoxyethyl), hydrogen, optionally substituted C₁₋₃₀ alkyl, optionally substituted C₂₋₃₀alkenyl, optionally substituted C₂₋₃₀alkynyl, alkoxyalkylamine, alkoxyoxycarboxylate, amino, alkylamino, dialkylamino, 5-8 membered heterocyclyl, —O—C₄₋₃₀alkyl-ON(CH₂R⁸)(CH₂R⁹), —O—C₄₋₃₀alkyl-ON(CH₂R⁸)(CH₂R⁹), a ligand, a linker covalently bonded to one or more ligands or a bond to an internucleotide linkage to a subsequent nucleoside;
R²³ is a bond to an internucleotide linkage to a subsequent nucleoside, hydroxyl, protected hydroxyl, halogen, optionally substituted C₂₋₃₀alkynyl, optionally substituted C₁₋₃₀ alkoxy (e.g., methoxy, 2-methoxyethoxy), alkoxyalkyl (e.g., 2-methoxyethyl), hydrogen, optionally substituted C₁₋₃₀ alkyl, optionally substituted C₂₋₃₀alkenyl, alkoxyalkylamine, alkoxyoxycarboxylate, amino, alkylamino,
dialkylamino, 5-8 membered heterocyclyl, —O—C₄₋₃₀alkyl-ON(CH₂R⁸)(CH₂R⁹), —O—C₄₋₃₀alkyl-ON(CH₂R⁸)(CH₂R⁹), phosphate group, a ligand, or a linker covalently bonded to one or more ligands;
R²⁴ is hydrogen, optionally substituted C₁₋₆alkyl, optionally substituted C₂₋₆alkenyl, optionally substituted C₂₋₆alkynyl, or optionally substituted C₁₋₆alkoxy;
or R²² and R²⁴ taken together are 4′-C(R¹⁰R¹¹)ᵥ—Y-2′ or 4′-Y—C(R¹⁰R¹¹)ᵥ-2′;
Y is —O—, —CH₂—, —CH(Me)-, —C(CH₃)₂—, —S—, —N(R¹²)—, —C(O)—, —C(S)—, —S(O)—, —S(O)₂—, —OC(O)—, —C(O)O—, —N(R¹²)C(O)—, or —C(O)N(R¹²)—;
R¹⁰ and R¹¹ independently are H, optionally substituted C₁-C₆alkyl, optionally substituted C₂-C₆alkenyl or optionally substituted C₂-C₆alkynyl;
R¹² is hydrogen, optionally substituted C₁₋₃₀alkyl, optionally substituted C₁-C₃₀alkoxy, C₁₋₄haloalkyl, optionally substituted C₂₋₄alkenyl, optionally substituted C₂₋₄alkynyl, optionally substituted C₁₋₃₀alkyl-CO₂H, or a nitrogen-protecting group;
v is 1, 2 or 3; and
R⁵ is -L¹-R^{H}, —O—N(R¹³)R¹⁴,
where X^{P} is a phosphate group;
L¹ is a bond, -L³-, C₁₋₃₀alkylene, C₂₋₃₀alkenylene, C₂₋₃₀alkynylene, *-L³-C₁₋₃₀alkylene *-L³-C₂₋₃₀alkenylene, or *-L³-C₂₋₃₀alkynylene;
L³ is —O—, —N(R^{L3})—, —S—, —C(O)—, —S(O)—, —S(O)₂—, —P(X^{L3}) (Y^{L3}R^{L3B})—;
where R¹³ is hydrogen, optionally substituted C₁₋₃₀alkyl,
optionally substituted C₁-C₃₀alkoxy, C₁₋₄haloalkyl,
optionally substituted C₂₋₄alkenyl, optionally substituted C₂₋₄alkynyl, optionally substituted C₁₋₃₀alkyl-CO₂H, or a nitrogen-protecting group;
X^{L2} is O or S;
Y^{L3} is O, S, NH, or a bond; and
R^{L3B} is H or optionally substituted alkyl; and
* is bond to R^{H};
and
R^{H} is 4-8 membered heterocyclyl comprising 1, 2 or 3 heteroatoms selected independently from N, O and S, and the heterocyclyl is optionally substituted with 1, 2, 3 or 4 independently selected substituents, and provided that the heterocyclyl comprises at least one nitrogen atom, or R^{H} is, [chemical structure]
where X is O, NR^{L}, S, or CH₂; and R^{L} is hydrogen, a ligand, a linker covalently bonded to one or more ligands, aliphatic and aromatic alkyl, alkylester, alkylamine, dimethylamino alkyl, alkylether, alkylthioether, heteroaromatic alkyl, allyl, vinyl, alkyl groups functionalized with disulfide, oxime, ketone, acetal, hemiacetal, cleavable peptides, or cleavable sugars; and
R¹³ and R¹⁴ are independently -L²-R^{H2}, where:
L² is a linker; and
R^{H2} is 4-8 membered heterocyclyl comprising 1, 2 or 3 heteroatoms selected independently from N, O and S, and the heterocyclyl is optionally substituted with 1, 2, 3 or 4 independently selected substituents, and
provided that at least one of R¹³ and R¹⁴ is -L²-R^{H2}, and
provided that one of R²² and R²³ is a bond to an internucleotide linkage to a subsequent nucleoside and only one of R²² and R²³ is a bond to an internucleotide linkage to a subsequent nucleoside.

66. The oligonucleotide of claim 65, wherein the nucleoside of Formula (II) is selected from formulae (II-A)-(II-D): [chemical structure]
wherein:
R⁵ is -L¹-R^{H};
R²² is hydrogen, hydroxyl, protected hydroxyl, halogen, optionally substituted C₁₋₃₀ alkoxy (e.g., methoxy, 2-methoxyethoxy), alkoxyalkyl (e.g., 2-methoxyethyl), amino, alkylamino, or dialkylamino;
R²³ is a bond to an internucleotide linkage to a subsequent nucleoside;
R²⁴ is hydrogen or R²² and R²⁴ taken together are 4′-C(R¹⁰R¹¹)ᵥ—Y-2′ or 4′-Y—C(R¹⁰R¹¹)ᵥ-2′; and
X^{S}, B, Y, R¹⁰ and R¹¹ are as defined in claim 34.

67. The oligonucleotide of claim 66, wherein the nucleoside is of Formula (II-Ea), (II-E′) or (II-E″: [chemical structure]
wherein
n is 0 or an integer selected from 1 to 30 (e.g., n is 1, 2, 3, 4, 5, 6, 7, 8, 9, 10, 11, 12, 13, 14, 15, 16, 16, 17, 18, 19, 20, 21, 22, 23, 24, 25, 26, 27, 28, 29 or 30, such as n is 1, 2, 3, 4, 5 or 6, preferably n is 0 or 1);
X is O, NR^{L}, S, or CH₂; and
R^{L} is H, a ligand, a linker covalently bonded to one or more ligands, aliphatic and aromatic alkyl, alkylester, alkylamine, dimethylamino alkyl, alkylether, alkylthioether, heteroaromatic alkyl, allyl, vinyl, alkyl groups functionalized with disulfide, oxime, ketone, acetal, hemiacetal, cleavable peptides, or cleavable sugars, and optionally, the compound is of Formula (II-Eb) or (II-Ec):

[chemical structure]

68. The oligonucleotide of claim 67, wherein the nucleoside is of Formula (II-Ed), (II-Ee), (II-E3) or (II-E⁴): [chemical structure]
where n is 0 or an integer selected from 1 to 30 (e.g., n is 1, 2, 3, 4, 5, 6, 7, 8, 9, 10, 11, 12, 13, 14, 15, 16, 16, 17, 18, 19, 20, 21, 22, 23, 24, 25, 26, 27, 28, 29 or 30, such as n is 1, 2, 3, 4, 5 or 6, preferably n is 0 or 1); and
R^{L} is H, a ligand, a linker covalently bonded to one or more ligands, aliphatic and aromatic alkyl, alkylester, alkylamine, dimethylamino alkyl, alkylether, alkylthioether, heteroaromatic alkyl, allyl, vinyl, alkyl groups functionalized with disulfide, oxime, ketone, acetal, hemiacetal, cleavable peptides, or cleavable sugars, and
optionally, the compound is of Formula (II-Ef) or (II-Eg):

[chemical structure]

69. The oligonucleotide of any one of claims 65-68, wherein the oligonucleotide comprises from 3 to 50 nucleotides.

70. The oligonucleotide of any one of claims 65-69, wherein:
a. the oligonucleotide comprises at least one ribonucleotide;
b. the oligonucleotide comprises at least one 2′-deoxyribonucleotide;
c. the oligonucleotide comprises at least one nucleoside with a modified or non-natural nucleobase in addition to the nucleoside of Formula (II);
d. the oligonucleotide comprises at least one nucleoside with a modified ribose sugar in addition to the nucleoside of Formula (II);
e. the oligonucleotide comprises at least one nucleoside comprising a group other than H or OH at the 2′-position of the ribose sugar in addition to the nucleoside of Formula (II);
f. the oligonucleotide comprises at least one nucleoside with a 2′-F ribose in addition to the nucleoside of Formula (II);
g. the oligonucleotide comprises at least one nucleoside with a 2′-OMe ribose in addition to the nucleoside of Formula (II);
h. the oligonucleotide comprises at least one nucleoside comprising a moiety other than a ribose sugar in addition to the nucleoside of Formula (II);
i. the oligonucleotide comprises at least one modified internucleotide linkage;
j. the internucleotide linkage to the subsequent to the nucleoside of Formula (II) is a modified internucleotide linkage, optionally, the modified internucleotide linkage is a phosphorothioate linkage;
k. the oligonucleotide is attached to a solid support;
l. oligonucleotide comprises at least one ligand; and/or
m. the oligonucleotide comprises at least one hydroxyl, phosphate or amino protecting group.

71. A double-stranded nucleic acid comprising a first oligonucleotide strand and a second oligonucleotide strand substantially complementary to the first strand, wherein the first or second strand is an oligonucleotide of any one of claims 64-70, optionally, the first and second strand are independently 15 to 25 nucleotides in length.

72. The double-stranded nucleic acid claim 71, wherein double-stranded nucleic acid is capable of inducing RNA interference.

73. The double-stranded nucleic acid of claim 71 or 72, wherein one of the first stand and second strand is the oligonucleotide of any one of claims 64-70 and the other strand comprises on its 5′-end a vinylphosphonate group (VP) group (e.g., *═CH—X^{P}, X^{P} is a phosphate group and * is C5′), C₃₋₆ cycloalkylphosphonate (e.g., cyclopropylphosphonate), monophosphate ((HO)₂(O) P—O-5′), diphosphate ((HO)₂(O) P—O—P(HO)(O)—O-5′), triphosphate ((HO)₂(O) P—O—(HO)(O) P—O—P(HO)(O)—O-5′); monothiophosphate (phosphorothioate, (HO)2 (S) P—O-5′), monodithiophosphate (phosphorodithioate; (HO)(HS)(S) P—O-5′), phosphorothiolate ((HO)₂(O) P—S-5′); alpha-thiotriphosphate; beta-thiotriphosphate; gamma-thiotriphosphate; phosphoramidates ((HO)₂(O) P—NH-5′, (HO)(NH₂)(O) P—O-5′), alkylphosphonates [(R^{P})(OH)(O) P—O-5′, R^{P} is optionally substituted C₁₋₃₀ alkyl, e.g., methyl, ethyl, isopropyl, or propyl)], alkyletherphosphonates [(R^{P1})(OH)(O) P—O-5′, R^{P1} is alkoxyalkyl, e.g., methoxymethyl (CH₂OMe) or ethoxymethyl], (HO)₂(X) P—O[—(CH₂)ₐ—O—P(X)(OH)—O]_{b}-5′ or (HO)₂(X) P—O[—(CH₂)ₐ—P(X)(OH)—O]_{b}-5′ or (HO)₂(X) P—[—(CH₂)ₐ—O—P(X)(OH)—O]_{b}-5′, or optionally substituted alkyl, and dialkyl terminal phosphates and phosphate mimics (e.g., HO[—(CH₂)ₐ—O—P(X)(OH)—O]_{b}-5′, H₂N[—(CH₂)ₐ—O—P(X)(OH)—O]_{b}-5′, H[—(CH₂)ₐ—O—P(X)(OH)—O]_{b}-5′, Me₂N[—(CH₂)ₐ—O—P(X)(OH)—O]_{b}-5′, HO[—(CH₂)ₐ—P(X)(OH)—O]_{b}-5′, H₂N[—(CH₂)ₐ—P(X)(OH)—O]_{b}-5′, H[—(CH₂)ₐ—P(X)(OH)—O]_{b}-5′, Me₂N[—(CH₂)ₐ—P(X)(OH)—O]_{b}-5′, wherein X is O or S; and a and b are each independently 1-10, optionally, the strand comprises a vinylphosphonate group, e.g., an E-vinylphosphonate group.

74. The double-stranded nucleic acid of any one of claims 71-73, wherein the double-stranded nucleic acid comprises a sense strand and an antisense strand, and wherein the sense strand is the oligonucleotide of any one of claims 64-70.

75. The double-stranded nucleic acid of any one of claims 71-74, wherein one or both strands have a 1-5 nucleotide overhang on its respective 5′-end or 3′-end, optionally, only one strand has a 2 nucleotide overhang on its 5′-end or 3′-end, optionally, only one strand has a 2 nucleotide overhand on its 3′-end.

76. A pharmaceutical composition comprising an oligonucleotide of any one of claims 64-70 or dsRNA molecule of any one of claim 1-33 or 71-75, alone or in combination with a pharmaceutically acceptable carrier or excipient.

77. A gene silencing kit containing an oligonucleotide of any one of claims 64-70 or dsRNA molecule of any one of claim 1-33 or 71-75.

78. A method for silencing a target gene in a cell, the method comprising a step of introducing into the cell:
(i) a double-stranded RNA according to any one of claim 1-33 or 71-75, wherein the antisense strand comprises a nucleotide sequence substantially complementary to the target gene; or
(ii) an oligonucleotide according to any one of claims 64-70, wherein the oligonucleotide comprises a nucleotide sequence substantially complementary to the target gene.

79. A method of reducing the expression of a target gene in a subject, comprising administering to the subject either:
(i) a double-stranded RNA according to any one of claim 1-33 or 71-75, wherein the antisense strand comprises a nucleotide sequence substantially complementary to the target gene; or
(ii) an oligonucleotide according to any one of claims 64-70, wherein the oligonucleotide comprises a nucleotide sequence substantially complementary to a target gene.

80. The method of claim 79, wherein said administering is subcutaneous or intravenous administration.

The application's sequence listing, which the Patent Office published only in electronic form, follows.

SEQUENCE LISTING (336 sequences)

SEQ ID NO: 1 - protein, 29 aa, unidentified
AALEALAEALEALAEALEALAEAAAAGGC

SEQ ID NO: 2 - protein, 30 aa, unidentified
AALAEALAEALAEALAEALAEALAAAAGGC

SEQ ID NO: 3 - protein, 15 aa, unidentified
ALEALAEALEALAEA

SEQ ID NO: 4 - protein, 22 aa, unidentified
GLFEAIEGFIENGWEGMIWDYG

SEQ ID NO: 5 - protein, 23 aa, unidentified
GLFGAIAGFIENGWEGMIDGWYG

SEQ ID NO: 6 - protein, 43 aa, unidentified
GLFEAIEGFIENGWEGMIDGWYGCGLFEAIEGFIENGWEGMID

SEQ ID NO: 7 - protein, 44 aa, unidentified
GLFEAIEGFIENGWEGMIDGGCGLFEAIEGFIENGWEGMIDGGC

SEQ ID NO: 8 - protein, 35 aa, unidentified
GLFGALAEALAEALAEHLAEALAEALEALAAGGSC

SEQ ID NO: 9 - protein, 34 aa, unidentified
GLFEAIEGFIENGWEGLAEALAEALEALAAGGSC

SEQ ID NO: 10 - protein, 41 aa, unidentified
  SITE 17: note = Norleucine
  SITE 38: note = Norleucine
GLFEAIEGFIENGWEGXIDGKGLFEAIEGFIENGWEGXIDG

SEQ ID NO: 11 - protein, 19 aa, unidentified
LFEALLELLESLWELLLEA

SEQ ID NO: 12 - protein, 20 aa, unidentified
GLFKALLKLLKSLWKLLLKA

SEQ ID NO: 13 - protein, 20 aa, unidentified
GLFRALLRLLRSLWRLLLRA

SEQ ID NO: 14 - protein, 30 aa, unidentified
WEAKLAKALAKALAKHLAKALAKALKACEA

SEQ ID NO: 15 - protein, 22 aa, unidentified
GLFFEAIAEFIEGGWEGLIEGC

SEQ ID NO: 16 - protein, 26 aa, unidentified
GIGAVLKVLTTGLPALISWIKRKRQQ

SEQ ID NO: 17 - protein, 8 aa, unidentified
HHHHHWYG

SEQ ID NO: 18 - protein, 10 aa, unidentified
CHKKKKKKHC

SEQ ID NO: 19 - protein, 16 aa, unidentified
RQIKIWFQNRRMKWKK

SEQ ID NO: 20 - protein, 14 aa, unidentified
GRKKRRQRRRPPQC

SEQ ID NO: 21 - protein, 27 aa, unidentified
GALFLGWLGAAGSTMGAWSQPKKKRKV

SEQ ID NO: 22 - protein, 18 aa, unidentified
LLIILRRRIRKQAHAHSK

SEQ ID NO: 23 - protein, 26 aa, unidentified
GWTLNSAGYLLKINLKALAALAKKIL

SEQ ID NO: 24 - protein, 18 aa, unidentified
KLALKLALKALKAALKLA

SEQ ID NO: 25 - protein, 9 aa, unidentified
RRRRRRRRR

SEQ ID NO: 26 - protein, 10 aa, unidentified
KFFKFFKFFK

SEQ ID NO: 27 - protein, 37 aa, unidentified
LLGDFFRKSKEKIGKEFKRIVQRIKDFLRNLVPRTES

SEQ ID NO: 28 - protein, 31 aa, unidentified
SWLSKTAKKLENSAKKRISEGIAIAIQGGPR

SEQ ID NO: 29 - protein, 30 aa, unidentified
ACYCRIPACIAGERRYGTCIYQGRLWAFCC

SEQ ID NO: 30 - protein, 36 aa, unidentified
DHYNCVSSGGQCLYSACPIFTKIQGTCYRGKAKCCK

SEQ ID NO: 31 - protein, 42 aa, unidentified
  SITE 42: note = C-terminal amide
RRRPRPPYLPRPRPPPFFPPRLPPRIPPGFPPRFPPRFPGKR

SEQ ID NO: 32 - protein, 13 aa, unidentified
  SITE 13: note = C-terminal amide
ILPWKWPWWPWRR

SEQ ID NO: 33 - protein, 16 aa, unidentified
AAVALLPAVLLALLAP

SEQ ID NO: 34 - protein, 11 aa, unidentified
AALLPVLLAAP

SEQ ID NO: 35 - protein, 12 aa, unidentified
RKCRIVVIRVCR

SEQ ID NO: 36 - RNA, 21 nt, synthetic construct
  source 1..21: mol_type = other RNA
  modified_base 1: mod_base = OTHER; note = 2'-deoxy-2'-fluoroadenosine-3'-phosphorothioate
  modified_base 2: mod_base = OTHER; note = 2'-O-methyladenosine-3'-phosphorothioate
  modified_base 3: mod_base = OTHER; note = 2'-deoxy-2'-fluorocytidine-3'-phosphate
  modified_base 4: mod_base = OTHER; note = 2'-O-methyladenosine-3'-phosphate
  modified_base 5: mod_base = OTHER; note = 2'-deoxy-2'-fluoroguanosine-3'-phosphate
  modified_base 6: mod_base = OTHER; note = 2'-O-methyluridine-3'-phosphate
  modified_base 7: mod_base = OTHER; note = 2'-deoxy-2'-fluoroguanosine-3'-phosphate
  modified_base 8: mod_base = OTHER; note = 2'-O-methyluridine-3'-phosphate
  modified_base 9: mod_base = OTHER; note = 2'-deoxy-2'-fluorouridine-3'-phosphate
  modified_base 10: mod_base = OTHER; note = 2'-deoxy-2'-fluorocytidine-3'-phosphate
  modified_base 11: mod_base = OTHER; note = 2'-deoxy-2'-fluorouridine-3'-phosphate
  modified_base 12: mod_base = OTHER; note = 2'-O-methyluridine-3'-phosphate
  modified_base 13: mod_base = OTHER; note = 2'-deoxy-2'-fluoroguanosine-3'-phosphate
  modified_base 14: mod_base = OTHER; note = 2'-O-methylcytidine-3'-phosphate
  modified_base 15: mod_base = OTHER; note = 2'-deoxy-2'-fluorouridine-3'-phosphate
  modified_base 16: mod_base = OTHER; note = 2'-O-methylcytidine-3'-phosphate
  modified_base 17: mod_base = OTHER; note = 2'-deoxy-2'-fluorouridine-3'-phosphate
  modified_base 18: mod_base = OTHER; note = 2'-O-methyladenosine-3'-phosphate
  modified_base 19: mod_base = OTHER; note = 2'-deoxy-2'-fluorouridine-3'-phosphate
  modified_base 20: mod_base = OTHER; note = 2'-O-methyladenosine-3'-phosphate
  modified_base 21: mod_base = OTHER; note = 2'-deoxy-2'-fluoroadenosine-3'-phosphate ((2S,4R)-1-[29-[[2-(acetylamino)-2-deoxy-beta-D-galactopyra nosyl]oxy]-14,14-bis[[3-[[3-[[5-[[2-(acetylamino)-2-deoxy-b eta-D-galactopyranosyl]oxy]-1-oxopentyl]amino]propyl]amino] -3-oxopropoxy]methyl]-1,12,19,25-tetraoxo-16-oxa-13,20,24-t riazanonacos-1-yl]-4-hydroxy-2-pyrrolidinyl)methyl ester
aacagtgttcttgctctataa

SEQ ID NO: 37 - RNA, 23 nt, synthetic construct
  source 1..23: mol_type = other RNA
  modified_base 1: mod_base = OTHER; note = 2'-O-methyluridine-3'-phosphorothioate
  modified_base 2: mod_base = OTHER; note = 2'-deoxy-2'-fluorouridine-3'-phosphorothioate
  modified_base 3: mod_base = OTHER; note = 2'-O-methyladenosine-3'-phosphate
  modified_base 4: mod_base = OTHER; note = 2'-deoxy-2'-fluorouridine-3'-phosphate
  modified_base 5: mod_base = OTHER; note = 2'-O-methyladenosine-3'-phosphate
  modified_base 6: mod_base = OTHER; note = 2'-deoxy-2'-fluoroguanosine-3'-phosphate
  modified_base 7: mod_base = OTHER; note = 2'-O-methyladenosine-3'-phosphate
  modified_base 8: mod_base = OTHER; note = 2'-deoxy-2'-fluoroguanosine-3'-phosphate
  modified_base 9: mod_base = OTHER; note = 2'-O-methylcytidine-3'-phosphate
  modified_base 10: mod_base = OTHER; note = 2'-deoxy-2'-fluoroadenosine-3'-phosphate
  modified_base 11: mod_base = OTHER; note = 2'-O-methyladenosine-3'-phosphate
  modified_base 12: mod_base = OTHER; note = 2'-O-methylguanosine-3'-phosphate
  modified_base 13: mod_base = OTHER; note = 2'-O-methyladenosine-3'-phosphate
  modified_base 14: mod_base = OTHER; note = 2'-deoxy-2'-fluoroadenosine-3'-phosphate
  modified_base 15: mod_base = OTHER; note = 2'-O-methylcytidine-3'-phosphate
  modified_base 16: mod_base = OTHER; note = 2'-deoxy-2'-fluoroadenosine-3'-phosphate
  modified_base 17: mod_base = OTHER; note = 2'-O-methylcytidine-3'-phosphate
  modified_base 18: mod_base = OTHER; note = 2'-deoxy-2'-fluorouridine-3'-phosphate
  modified_base 19: mod_base = OTHER; note = 2'-O-methylguanosine-3'-phosphate
  modified_base 20: mod_base = OTHER; note = 2'-deoxy-2'-fluorouridine-3'-phosphate
  modified_base 21: mod_base = OTHER; note = 2'-O-methyluridine-3'-phosphorothioate
  modified_base 22: mod_base = OTHER; note = 2'-O-methyluridine-3'-phosphorothioate
  modified_base 23: mod_base = OTHER; note = 2'-O-methyluridine
ttatagagcaagaacactgtttt

SEQ ID NO: 38 - RNA, 21 nt, synthetic construct
  source 1..21: mol_type = other RNA
  modified_base 1: mod_base = OTHER; note = 2'-deoxy-2'-fluoroadenosine-3'-phosphorothioate
  modified_base 2: mod_base = OTHER; note = 2'-O-methyladenosine-3'-phosphorothioate
  modified_base 3: mod_base = OTHER; note = 2'-deoxy-2'-fluorocytidine-3'-phosphate
  modified_base 4: mod_base = OTHER; note = 2'-O-methyladenosine-3'-phosphate
  modified_base 5: mod_base = OTHER; note = 2'-deoxy-2'-fluoroguanosine-3'-phosphate
  modified_base 6: mod_base = OTHER; note = 2'-O-methyluridine-3'-phosphate
  modified_base 7: mod_base = OTHER; note = 2'-deoxy-2'-fluoroguanosine-3'-phosphate
  modified_base 8: mod_base = OTHER; note = 2'-O-methyluridine-3'-phosphate
  modified_base 9: mod_base = OTHER; note = 2'-deoxy-2'-fluorouridine-3'-phosphate
  modified_base 10: mod_base = OTHER; note = 2'-deoxy-2'-fluorocytidine-3'-phosphate
  modified_base 11: mod_base = OTHER; note = 2'-deoxy-2'-fluorouridine-3'-phosphate
  modified_base 12: mod_base = OTHER; note = 2'-O-methyluridine-3'-phosphate
  modified_base 13: mod_base = OTHER; note = 2'-deoxy-2'-fluoroguanosine-3'-phosphate
  modified_base 14: mod_base = OTHER; note = 2'-O-methylcytidine-3'-phosphate
  modified_base 15: mod_base = OTHER; note = 2'-deoxy-2'-fluorouridine-3'-phosphate
  modified_base 16: mod_base = OTHER; note = 2'-O-methylcytidine-3'-phosphate
  modified_base 17: mod_base = OTHER; note = 2'-deoxy-2'-fluorouridine-3'-phosphate
  modified_base 18: mod_base = OTHER; note = 2'-O-methyladenosine-3'-phosphate
  modified_base 19: mod_base = OTHER; note = 2'-deoxy-2'-fluorouridine-3'-phosphorothioate
  modified_base 20: mod_base = OTHER; note = 2'-O-methyladenosine-3'-phosphorothioate
  modified_base 21: mod_base = OTHER; note = 2'-deoxy-2'-fluoroadenosine
aacagtgttcttgctctataa

SEQ ID NO: 39 - RNA, 23 nt, synthetic construct
  source 1..23: mol_type = other RNA
  modified_base 1: mod_base = OTHER; note = 2'-O-methyluridine-3'-phosphorothioate
  modified_base 2: mod_base = OTHER; note = 2'-deoxy-2'-fluorouridine-3'-phosphorothioate
  modified_base 3: mod_base = OTHER; note = 2'-O-methyladenosine-3'-phosphate
  modified_base 4: mod_base = OTHER; note = 2'-deoxy-2'-fluorouridine-3'-phosphate
  modified_base 5: mod_base = OTHER; note = 2'-O-methyladenosine-3'-phosphate
  modified_base 6: mod_base = OTHER; note = 2'-deoxy-2'-fluoroguanosine-3'-phosphate
  modified_base 7: mod_base = OTHER; note = 2'-O-methyladenosine-3'-phosphate
  modified_base 8: mod_base = OTHER; note = 2'-deoxy-2'-fluoroguanosine-3'-phosphate
  modified_base 9: mod_base = OTHER; note = 2'-O-methylcytidine-3'-phosphate
  modified_base 10: mod_base = OTHER; note = 2'-deoxy-2'-fluoroadenosine-3'-phosphate
  modified_base 11: mod_base = OTHER; note = 2'-O-methyladenosine-3'-phosphate
  modified_base 12: mod_base = OTHER; note = 2'-O-methylguanosine-3'-phosphate
  modified_base 13: mod_base = OTHER; note = 2'-O-methyladenosine-3'-phosphate
  modified_base 14: mod_base = OTHER; note = 2'-deoxy-2'-fluoroadenosine-3'-phosphate
  modified_base 15: mod_base = OTHER; note = 2'-O-methylcytidine-3'-phosphate
  modified_base 16: mod_base = OTHER; note = 2'-deoxy-2'-fluoroadenosine-3'-phosphate
  modified_base 17: mod_base = OTHER; note = 2'-O-methylcytidine-3'-phosphate
  modified_base 18: mod_base = OTHER; note = 2'-deoxy-2'-fluorouridine-3'-phosphate
  modified_base 19: mod_base = OTHER; note = 2'-O-methylguanosine-3'-phosphate
  modified_base 20: mod_base = OTHER; note = 2'-deoxy-2'-fluorouridine-3'-phosphate
  modified_base 21: mod_base = OTHER; note = 2'-O-methyluridine-3'-phosphorothioate
  modified_base 22: mod_base = OTHER; note = 2'-O-methyluridine-3'-phosphorothioate
  modified_base 23: mod_base = OTHER; note = 2'-O-methyluridine-3'-phosphate ((2S,4R)-1-[29-[[2-(acetylamino)-2-deoxy-beta-D-galactopyra nosyl]oxy]-14,14-bis[[3-[[3-[[5-[[2-(acetylamino)-2-deoxy-b eta-D-galactopyranosyl]oxy]-1-oxopentyl]amino]propyl]amino] -3-oxopropoxy]methyl]-1,12,19,25-tetraoxo-16-oxa-13,20,24-t riazanonacos-1-yl]-4-hydroxy-2-pyrrolidinyl)methyl ester
ttatagagcaagaacactgtttt

SEQ ID NO: 40 - RNA, 21 nt, synthetic construct
  source 1..21: mol_type = other RNA
  modified_base 1: mod_base = OTHER; note = 2'-deoxy-2'-fluoroadenosine-3'-phosphorothioate
  modified_base 2: mod_base = OTHER; note = 2'-O-methyladenosine-3'-phosphorothioate
  modified_base 3: mod_base = OTHER; note = 2'-deoxy-2'-fluorocytidine-3'-phosphate
  modified_base 4: mod_base = OTHER; note = 2'-O-methyladenosine-3'-phosphate
  modified_base 5: mod_base = OTHER; note = 2'-deoxy-2'-fluoroguanosine-3'-phosphate
  modified_base 6: mod_base = OTHER; note = 2'-O-methyluridine-3'-phosphate
  modified_base 7: mod_base = OTHER; note = 2'-deoxy-2'-fluoroguanosine-3'-phosphate
  modified_base 8: mod_base = OTHER; note = 2'-O-methyluridine-3'-phosphate
  modified_base 9: mod_base = OTHER; note = 2'-deoxy-2'-fluorouridine-3'-phosphate
  modified_base 10: mod_base = OTHER; note = 2'-deoxy-2'-fluorocytidine-3'-phosphate
  modified_base 11: mod_base = OTHER; note = 2'-deoxy-2'-fluorouridine-3'-phosphate
  modified_base 12: mod_base = OTHER; note = 2'-O-methyluridine-3'-phosphate
  modified_base 13: mod_base = OTHER; note = 2'-deoxy-2'-fluoroguanosine-3'-phosphate
  modified_base 14: mod_base = OTHER; note = 2'-O-methylcytidine-3'-phosphate
  modified_base 15: mod_base = OTHER; note = 2'-deoxy-2'-fluorouridine-3'-phosphate
  modified_base 16: mod_base = OTHER; note = 2'-O-methylcytidine-3'-phosphate
  modified_base 17: mod_base = OTHER; note = 2'-deoxy-2'-fluorouridine-3'-phosphate
  modified_base 18: mod_base = OTHER; note = 2'-O-methyladenosine-3'-phosphate
  modified_base 19: mod_base = OTHER; note = 2'-deoxy-2'-fluorouridine-3'-phosphorothioate
  modified_base 20: mod_base = OTHER; note = 2'-O-methyladenosine-3'-phosphorothioate
  modified_base 21: mod_base = OTHER; note = 2'-deoxy-2'-fluoroadenosine
aacagtgttcttgctctataa

SEQ ID NO: 41 - RNA, 23 nt, synthetic construct
  source 1..23: mol_type = other RNA
  modified_base 1: mod_base = OTHER; note = 2'-O-methyluridine-3'-phosphorothioate
  modified_base 2: mod_base = OTHER; note = 2'-deoxy-2'-fluorouridine-3'-phosphorothioate
  modified_base 3: mod_base = OTHER; note = 2'-O-methyladenosine-3'-phosphate
  modified_base 4: mod_base = OTHER; note = 2'-deoxy-2'-fluorouridine-3'-phosphate
  modified_base 5: mod_base = OTHER; note = 2'-O-methyladenosine-3'-phosphate
  modified_base 6: mod_base = OTHER; note = 2'-deoxy-2'-fluoroguanosine-3'-phosphate
  modified_base 7: mod_base = OTHER; note = 2'-O-methyladenosine-3'-phosphate
  modified_base 8: mod_base = OTHER; note = 2'-deoxy-2'-fluoroguanosine-3'-phosphate
  modified_base 9: mod_base = OTHER; note = 2'-O-methylcytidine-3'-phosphate
  modified_base 10: mod_base = OTHER; note = 2'-deoxy-2'-fluoroadenosine-3'-phosphate
  modified_base 11: mod_base = OTHER; note = 2'-O-methyladenosine-3'-phosphate
  modified_base 12: mod_base = OTHER; note = 2'-O-methylguanosine-3'-phosphate
  modified_base 13: mod_base = OTHER; note = 2'-O-methyladenosine-3'-phosphate
  modified_base 14: mod_base = OTHER; note = 2'-deoxy-2'-fluoroadenosine-3'-phosphate
  modified_base 15: mod_base = OTHER; note = 2'-O-methylcytidine-3'-phosphate
  modified_base 16: mod_base = OTHER; note = 2'-deoxy-2'-fluoroadenosine-3'-phosphate
  modified_base 17: mod_base = OTHER; note = 2'-O-methylcytidine-3'-phosphate
  modified_base 18: mod_base = OTHER; note = 2'-deoxy-2'-fluorouridine-3'-phosphate
  modified_base 19: mod_base = OTHER; note = 2'-O-methylguanosine-3'-phosphate
  modified_base 20: mod_base = OTHER; note = 2'-deoxy-2'-fluorouridine-3'-phosphate
  modified_base 21: mod_base = OTHER; note = 2'-O-methyluridine-3'-phosphate
  modified_base 22: mod_base = OTHER; note = 2'-O-methyluridine-3'-phosphate
  modified_base 23: mod_base = OTHER; note = 2'-O-methyluridine-3'-phosphate ((2S,4R)-1-[29-[[2-(acetylamino)-2-deoxy-beta-D-galactopyra nosyl]oxy]-14,14-bis[[3-[[3-[[5-[[2-(acetylamino)-2-deoxy-b eta-D-galactopyranosyl]oxy]-1-oxopentyl]amino]propyl]amino] -3-oxopropoxy]methyl]-1,12,19,25-tetraoxo-16-oxa-13,20,24-t riazanonacos-1-yl]-4-hydroxy-2-pyrrolidinyl)methyl ester
ttatagagcaagaacactgtttt

SEQ ID NO: 42 - RNA, 21 nt, synthetic construct
  source 1..21: mol_type = other RNA
  modified_base 1: mod_base = OTHER; note = 2'-deoxy-2'-fluoroadenosine-3'-phosphorothioate
  modified_base 2: mod_base = OTHER; note = 2'-O-methyladenosine-3'-phosphorothioate
  modified_base 3: mod_base = OTHER; note = 2'-deoxy-2'-fluorocytidine-3'-phosphate
  modified_base 4: mod_base = OTHER; note = 2'-O-methyladenosine-3'-phosphate
  modified_base 5: mod_base = OTHER; note = 2'-deoxy-2'-fluoroguanosine-3'-phosphate
  modified_base 6: mod_base = OTHER; note = 2'-O-methyluridine-3'-phosphate
  modified_base 7: mod_base = OTHER; note = 2'-deoxy-2'-fluoroguanosine-3'-phosphate
  modified_base 8: mod_base = OTHER; note = 2'-O-methyluridine-3'-phosphate
  modified_base 9: mod_base = OTHER; note = 2'-deoxy-2'-fluorouridine-3'-phosphate
  modified_base 10: mod_base = OTHER; note = 2'-deoxy-2'-fluorocytidine-3'-phosphate
  modified_base 11: mod_base = OTHER; note = 2'-deoxy-2'-fluorouridine-3'-phosphate
  modified_base 12: mod_base = OTHER; note = 2'-O-methyluridine-3'-phosphate
  modified_base 13: mod_base = OTHER; note = 2'-deoxy-2'-fluoroguanosine-3'-phosphate
  modified_base 14: mod_base = OTHER; note = 2'-O-methylcytidine-3'-phosphate
  modified_base 15: mod_base = OTHER; note = 2'-deoxy-2'-fluorouridine-3'-phosphate
  modified_base 16: mod_base = OTHER; note = 2'-O-methylcytidine-3'-phosphate
  modified_base 17: mod_base = OTHER; note = 2'-deoxy-2'-fluorouridine-3'-phosphate
  modified_base 18: mod_base = OTHER; note = 2'-O-methyladenosine-3'-phosphate
  modified_base 19: mod_base = OTHER; note = 2'-deoxy-2'-fluorouridine-3'-phosphorothioate
  modified_base 20: mod_base = OTHER; note = 2'-O-methyladenosine-3'-phosphorothioate
  modified_base 21: mod_base = OTHER; note = 2'-deoxy-2'-fluoroadenosine-3'-phosphate ((2S,4R)-1-[29-[[2-(acetylamino)-2-deoxy-beta-D-galactopyra nosyl]oxy]-14,14-bis[[3-[[3-[[5-[[2-(acetylamino)-2-deoxy-b eta-D-galactopyranosyl]oxy]-1-oxopentyl]amino]propyl]amino] -3-oxopropoxy]methyl]-1,12,19,25-tetraoxo-16-oxa-13,20,24-t riazanonacos-1-yl]-4-hydroxy-2-pyrrolidinyl)methyl ester
aacagtgttcttgctctataa

SEQ ID NO: 43 - RNA, 23 nt, synthetic construct
  source 1..23: mol_type = other RNA
  modified_base 1: mod_base = OTHER; note = 2'-O-methyluridine-3'-phosphorothioate
  modified_base 2: mod_base = OTHER; note = 2'-deoxy-2'-fluorouridine-3'-phosphorothioate
  modified_base 3: mod_base = OTHER; note = 2'-O-methyladenosine-3'-phosphate
  modified_base 4: mod_base = OTHER; note = 2'-deoxy-2'-fluorouridine-3'-phosphate
  modified_base 5: mod_base = OTHER; note = 2'-O-methyladenosine-3'-phosphate
  modified_base 6: mod_base = OTHER; note = 2'-deoxy-2'-fluoroguanosine-3'-phosphate
  modified_base 7: mod_base = OTHER; note = 2'-O-methyladenosine-3'-phosphate
  modified_base 8: mod_base = OTHER; note = 2'-deoxy-2'-fluoroguanosine-3'-phosphate
  modified_base 9: mod_base = OTHER; note = 2'-O-methylcytidine-3'-phosphate
  modified_base 10: mod_base = OTHER; note = 2'-deoxy-2'-fluoroadenosine-3'-phosphate
  modified_base 11: mod_base = OTHER; note = 2'-O-methyladenosine-3'-phosphate
  modified_base 12: mod_base = OTHER; note = 2'-O-methylguanosine-3'-phosphate
  modified_base 13: mod_base = OTHER; note = 2'-O-methyladenosine-3'-phosphate
  modified_base 14: mod_base = OTHER; note = 2'-deoxy-2'-fluoroadenosine-3'-phosphate
  modified_base 15: mod_base = OTHER; note = 2'-O-methylcytidine-3'-phosphate
  modified_base 16: mod_base = OTHER; note = 2'-deoxy-2'-fluoroadenosine-3'-phosphate
  modified_base 17: mod_base = OTHER; note = 2'-O-methylcytidine-3'-phosphate
  modified_base 18: mod_base = OTHER; note = 2'-deoxy-2'-fluorouridine-3'-phosphate
  modified_base 19: mod_base = OTHER; note = 2'-O-methylguanosine-3'-phosphate
  modified_base 20: mod_base = OTHER; note = 2'-deoxy-2'-fluorouridine-3'-phosphate
  modified_base 21: mod_base = OTHER; note = 2'-O-methyluridine-3'-phosphorothioate
  modified_base 22: mod_base = OTHER; note = 2'-O-methyluridine-3'-phosphorothioate
  modified_base 23: mod_base = OTHER; note = 2'-O-methyluridine
ttatagagcaagaacactgtttt

SEQ ID NO: 44 - RNA, 21 nt, synthetic construct
  source 1..21: mol_type = other RNA
  modified_base 1: mod_base = OTHER; note = 2'-deoxy-2'-fluoroadenosine-3'-phosphorothioate
  modified_base 2: mod_base = OTHER; note = 2'-O-methyladenosine-3'-phosphorothioate
  modified_base 3: mod_base = OTHER; note = 2'-deoxy-2'-fluorocytidine-3'-phosphate
  modified_base 4: mod_base = OTHER; note = 2'-O-methyladenosine-3'-phosphate
  modified_base 5: mod_base = OTHER; note = 2'-deoxy-2'-fluoroguanosine-3'-phosphate
  modified_base 6: mod_base = OTHER; note = 2'-O-methyluridine-3'-phosphate
  modified_base 7: mod_base = OTHER; note = 2'-deoxy-2'-fluoroguanosine-3'-phosphate
  modified_base 8: mod_base = OTHER; note = 2'-O-methyluridine-3'-phosphate
  modified_base 9: mod_base = OTHER; note = 2'-deoxy-2'-fluorouridine-3'-phosphate
  modified_base 10: mod_base = OTHER; note = 2'-deoxy-2'-fluorocytidine-3'-phosphate
  modified_base 11: mod_base = OTHER; note = 2'-deoxy-2'-fluorouridine-3'-phosphate
  modified_base 12: mod_base = OTHER; note = 2'-O-methyluridine-3'-phosphate
  modified_base 13: mod_base = OTHER; note = 2'-deoxy-2'-fluoroguanosine-3'-phosphate
  modified_base 14: mod_base = OTHER; note = 2'-O-methylcytidine-3'-phosphate
  modified_base 15: mod_base = OTHER; note = 2'-deoxy-2'-fluorouridine-3'-phosphate
  modified_base 16: mod_base = OTHER; note = 2'-O-methylcytidine-3'-phosphate
  modified_base 17: mod_base = OTHER; note = 2'-deoxy-2'-fluorouridine-3'-phosphate
  modified_base 18: mod_base = OTHER; note = 2'-O-methyladenosine-3'-phosphate
  modified_base 19: mod_base = OTHER; note = 2'-deoxy-2'-fluorouridine-3'-phosphate
  modified_base 20: mod_base = OTHER; note = 2'-O-methyladenosine-3'-phosphate
  modified_base 21: mod_base = OTHER; note = 2'-deoxy-2'-fluoroadenosine-3'-phosphate ((2S,4R)-1-[29-[[2-(acetylamino)-2-deoxy-beta-D-galactopyra nosyl]oxy]-14,14-bis[[3-[[3-[[5-[[2-(acetylamino)-2-deoxy-b eta-D-galactopyranosyl]oxy]-1-oxopentyl]amino]propyl]amino] -3-oxopropoxy]methyl]-1,12,19,25-tetraoxo-16-oxa-13,20,24-t riazanonacos-1-yl]-4-hydroxy-2-pyrrolidinyl)methyl ester
aacagtgttcttgctctataa

SEQ ID NO: 45 - DNA, 23 bp, synthetic construct
  source 1..23: mol_type = other DNA
  modified_base 1: mod_base = OTHER; note = 2'-O-methyluridine-3'-phosphorothioate
  modified_base 2: mod_base = OTHER; note = 2'-deoxy-2'-fluorouridine-3'-phosphorothioate
  modified_base 3: mod_base = OTHER; note = 2'-O-methyladenosine-3'-phosphate
  modified_base 4: mod_base = OTHER; note = 2'-deoxy-2'-fluorouridine-3'-phosphate
  modified_base 5: mod_base = OTHER; note = 2'-O-methyladenosine-3'-phosphate
  modified_base 6: mod_base = OTHER; note = 2'-deoxy-2'-fluoroguanosine-3'-phosphate
  modified_base 7: mod_base = OTHER; note = 2'-O-methyladenosine-3'-phosphate
  modified_base 8: mod_base = OTHER; note = 2'-deoxy-2'-fluoroguanosine-3'-phosphate
  modified_base 9: mod_base = OTHER; note = 2'-O-methylcytidine-3'-phosphate
  modified_base 10: mod_base = OTHER; note = 2'-deoxy-2'-fluoroadenosine-3'-phosphate
  modified_base 11: mod_base = OTHER; note = 2'-O-methyladenosine-3'-phosphate
  modified_base 12: mod_base = OTHER; note = 2'-O-methylguanosine-3'-phosphate
  modified_base 13: mod_base = OTHER; note = 2'-O-methyladenosine-3'-phosphate
  modified_base 14: mod_base = OTHER; note = 2'-deoxy-2'-fluoroadenosine-3'-phosphate
  modified_base 15: mod_base = OTHER; note = 2'-O-methylcytidine-3'-phosphate
  modified_base 16: mod_base = OTHER; note = 2'-deoxy-2'-fluoroadenosine-3'-phosphate
  modified_base 17: mod_base = OTHER; note = 2'-O-methylcytidine-3'-phosphate
  modified_base 18: mod_base = OTHER; note = 2'-deoxy-2'-fluorouridine-3'-phosphate
  modified_base 19: mod_base = OTHER; note = 2'-O-methylguanosine-3'-phosphate
  modified_base 20: mod_base = OTHER; note = 2'-deoxy-2'-fluorouridine-3'-phosphate
  modified_base 21: mod_base = OTHER; note = 2'-O-methyluridine-3'-phosphate
  modified_base 23: mod_base = OTHER; note = 2'-deoxythymidine-3'-phosphate ((2S,4R)-1-[29-[[2-(acetylamino)-2-deoxy-beta-D-galactopyra nosyl]oxy]-14,14-bis[[3-[[3-[[5-[[2-(acetylamino)-2-deoxy-b eta-D-galactopyranosyl]oxy]-1-oxopentyl]amino]propyl]amino] -3-oxopropoxy]methyl]-1,12,19,25-tetraoxo-16-oxa-13,20,24-t riazanonacos-1-yl]-4-hydroxy-2-pyrrolidinyl)methyl ester
  misc_feature 1..21: note = RNA
  misc_feature 22..23: note = DNA
ttatagagcaagaacactgtttt

SEQ ID NO: 46 - RNA, 21 nt, synthetic construct
  source 1..21: mol_type = other RNA
  modified_base 1: mod_base = OTHER; note = 2'-deoxy-2'-fluoroadenosine-3'-phosphorothioate
  modified_base 2: mod_base = OTHER; note = 2'-O-methyladenosine-3'-phosphorothioate
  modified_base 3: mod_base = OTHER; note = 2'-deoxy-2'-fluorocytidine-3'-phosphate
  modified_base 4: mod_base = OTHER; note = 2'-O-methyladenosine-3'-phosphate
  modified_base 5: mod_base = OTHER; note = 2'-deoxy-2'-fluoroguanosine-3'-phosphate
  modified_base 6: mod_base = OTHER; note = 2'-O-methyluridine-3'-phosphate
  modified_base 7: mod_base = OTHER; note = 2'-deoxy-2'-fluoroguanosine-3'-phosphate
  modified_base 8: mod_base = OTHER; note = 2'-O-methyluridine-3'-phosphate
  modified_base 9: mod_base = OTHER; note = 2'-deoxy-2'-fluorouridine-3'-phosphate
  modified_base 10: mod_base = OTHER; note = 2'-deoxy-2'-fluorocytidine-3'-phosphate
  modified_base 11: mod_base = OTHER; note = 2'-deoxy-2'-fluorouridine-3'-phosphate
  modified_base 12: mod_base = OTHER; note = 2'-O-methyluridine-3'-phosphate
  modified_base 13: mod_base = OTHER; note = 2'-deoxy-2'-fluoroguanosine-3'-phosphate
  modified_base 14: mod_base = OTHER; note = 2'-O-methylcytidine-3'-phosphate
  modified_base 15: mod_base = OTHER; note = 2'-deoxy-2'-fluorouridine-3'-phosphate
  modified_base 16: mod_base = OTHER; note = 2'-O-methylcytidine-3'-phosphate
  modified_base 17: mod_base = OTHER; note = 2'-deoxy-2'-fluorouridine-3'-phosphate
  modified_base 18: mod_base = OTHER; note = 2'-O-methyladenosine-3'-phosphate
  modified_base 19: mod_base = OTHER; note = 2'-deoxy-2'-fluorouridine-3'-phosphate
  modified_base 20: mod_base = OTHER; note = 2'-O-methyladenosine-3'-phosphate
  modified_base 21: mod_base = OTHER; note = 2'-deoxy-2'-fluoroadenosine-3'-phosphate ((2S,4R)-1-[29-[[2-(acetylamino)-2-deoxy-beta-D-galactopyra nosyl]oxy]-14,14-bis[[3-[[3-[[5-[[2-(acetylamino)-2-deoxy-b eta-D-galactopyranosyl]oxy]-1-oxopentyl]amino]propyl]amino] -3-oxopropoxy]methyl]-1,12,19,25-tetraoxo-16-oxa-13,20,24-t riazanonacos-1-yl]-4-hydroxy-2-pyrrolidinyl)methyl ester
aacagtgttcttgctctataa

SEQ ID NO: 47 - DNA, 23 bp, synthetic construct
  source 1..23: mol_type = other DNA
  modified_base 1: mod_base = OTHER; note = 2'-O-methyluridine-3'-phosphorothioate
  modified_base 2: mod_base = OTHER; note = 2'-deoxy-2'-fluorouridine-3'-phosphorothioate
  modified_base 3: mod_base = OTHER; note = 2'-O-methyladenosine-3'-phosphate
  modified_base 4: mod_base = OTHER; note = 2'-deoxy-2'-fluorouridine-3'-phosphate
  modified_base 5: mod_base = OTHER; note = 2'-O-methyladenosine-3'-phosphate
  modified_base 6: mod_base = OTHER; note = 2'-deoxy-2'-fluoroguanosine-3'-phosphate
  modified_base 7: mod_base = OTHER; note = 2'-O-methyladenosine-3'-phosphate
  modified_base 8: mod_base = OTHER; note = 2'-deoxy-2'-fluoroguanosine-3'-phosphate
  modified_base 9: mod_base = OTHER; note = 2'-O-methylcytidine-3'-phosphate
  modified_base 10: mod_base = OTHER; note = 2'-deoxy-2'-fluoroadenosine-3'-phosphate
  modified_base 11: mod_base = OTHER; note = 2'-O-methyladenosine-3'-phosphate
  modified_base 12: mod_base = OTHER; note = 2'-O-methylguanosine-3'-phosphate
  modified_base 13: mod_base = OTHER; note = 2'-O-methyladenosine-3'-phosphate
  modified_base 14: mod_base = OTHER; note = 2'-deoxy-2'-fluoroadenosine-3'-phosphate
  modified_base 15: mod_base = OTHER; note = 2'-O-methylcytidine-3'-phosphate
  modified_base 16: mod_base = OTHER; note = 2'-deoxy-2'-fluoroadenosine-3'-phosphate
  modified_base 17: mod_base = OTHER; note = 2'-O-methylcytidine-3'-phosphate
  modified_base 18: mod_base = OTHER; note = 2'-deoxy-2'-fluorouridine-3'-phosphate
  modified_base 19: mod_base = OTHER; note = 2'-O-methylguanosine-3'-phosphate
  modified_base 20: mod_base = OTHER; note = 2'-deoxy-2'-fluorouridine-3'-phosphate
  modified_base 21: mod_base = OTHER; note = 2'-O-methyluridine-3'-phosphorothioate
  modified_base 22: mod_base = OTHER; note = 2'-deoxythymidine-3'-phosphorothioate
  modified_base 23: mod_base = OTHER; note = 2'-deoxythymidine-3'-phosphate ((2S,4R)-1-[29-[[2-(acetylamino)-2-deoxy-beta-D-galactopyra nosyl]oxy]-14,14-bis[[3-[[3-[[5-[[2-(acetylamino)-2-deoxy-b eta-D-galactopyranosyl]oxy]-1-oxopentyl]amino]propyl]amino] -3-oxopropoxy]methyl]-1,12,19,25-tetraoxo-16-oxa-13,20,24-t riazanonacos-1-yl]-4-hydroxy-2-pyrrolidinyl)methyl ester
  misc_feature 1..21: note = RNA
  misc_feature 22..23: note = DNA
ttatagagcaagaacactgtttt

SEQ ID NO: 48 - RNA, 22 nt, synthetic construct
  source 1..22: mol_type = other RNA
  modified_base 1: mod_base = OTHER; note = 2'-O-methyladenosine-3'-phosphorothioate
  modified_base 2: mod_base = OTHER; note = 2'-deoxy-2'-fluoroadenosine-3'-phosphorothioate
  modified_base 3: mod_base = OTHER; note = 2'-O-methyladenosine-3'-phosphate
  modified_base 4: mod_base = OTHER; note = 2'-deoxy-2'-fluorocytidine-3'-phosphate
  modified_base 5: mod_base = OTHER; note = 2'-O-methyladenosine-3'-phosphate
  modified_base 6: mod_base = OTHER; note = 2'-deoxy-2'-fluoroguanosine-3'-phosphate
  modified_base 7: mod_base = OTHER; note = 2'-O-methyluridine-3'-phosphate
  modified_base 8: mod_base = OTHER; note = 2'-deoxy-2'-fluoroguanosine-3'-phosphate
  modified_base 9: mod_base = OTHER; note = 2'-O-methyluridine-3'-phosphate
  modified_base 10: mod_base = OTHER; note = 2'-deoxy-2'-fluorouridine-3'-phosphate
  modified_base 11: mod_base = OTHER; note = 2'-deoxy-2'-fluorocytidine-3'-phosphate
  modified_base 12: mod_base = OTHER; note = 2'-deoxy-2'-fluorouridine-3'-phosphate
  modified_base 13: mod_base = OTHER; note = 2'-O-methyluridine-3'-phosphate
  modified_base 14: mod_base = OTHER; note = 2'-deoxy-2'-fluoroguanosine-3'-phosphate
  modified_base 15: mod_base = OTHER; note = 2'-O-methylcytidine-3'-phosphate
  modified_base 16: mod_base = OTHER; note = 2'-deoxy-2'-fluorouridine-3'-phosphate
  modified_base 17: mod_base = OTHER; note = 2'-O-methylcytidine-3'-phosphate
  modified_base 18: mod_base = OTHER; note = 2'-deoxy-2'-fluorouridine-3'-phosphate
  modified_base 19: mod_base = OTHER; note = 2'-O-methyladenosine-3'-phosphate
  modified_base 20: mod_base = OTHER; note = 2'-deoxy-2'-fluorouridine-3'-phosphorothioate
  modified_base 21: mod_base = OTHER; note = 2'-O-methyladenosine-3'-phosphorothioate
  modified_base 22: mod_base = OTHER; note = 2'-deoxy-2'-fluoroadenosine
aaacagtgttcttgctctataa

SEQ ID NO: 49 - RNA, 22 nt, synthetic construct
  source 1..22: mol_type = other RNA
  modified_base 1: mod_base = OTHER; note = 2'-O-methyluridine-3'-phosphorothioate
  modified_base 2: mod_base = OTHER; note = 2'-deoxy-2'-fluorouridine-3'-phosphorothioate
  modified_base 3: mod_base = OTHER; note = 2'-O-methyladenosine-3'-phosphate
  modified_base 4: mod_base = OTHER; note = 2'-deoxy-2'-fluorouridine-3'-phosphate
  modified_base 5: mod_base = OTHER; note = 2'-O-methyladenosine-3'-phosphate
  modified_base 6: mod_base = OTHER; note = 2'-deoxy-2'-fluoroguanosine-3'-phosphate
  modified_base 7: mod_base = OTHER; note = 2'-O-methyladenosine-3'-phosphate
  modified_base 8: mod_base = OTHER; note = 2'-deoxy-2'-fluoroguanosine-3'-phosphate
  modified_base 9: mod_base = OTHER; note = 2'-O-methylcytidine-3'-phosphate
  modified_base 10: mod_base = OTHER; note = 2'-deoxy-2'-fluoroadenosine-3'-phosphate
  modified_base 11: mod_base = OTHER; note = 2'-O-methyladenosine-3'-phosphate
  modified_base 12: mod_base = OTHER; note = 2'-O-methylguanosine-3'-phosphate
  modified_base 13: mod_base = OTHER; note = 2'-O-methyladenosine-3'-phosphate
  modified_base 14: mod_base = OTHER; note = 2'-deoxy-2'-fluoroadenosine-3'-phosphate
  modified_base 15: mod_base = OTHER; note = 2'-O-methylcytidine-3'-phosphate
  modified_base 16: mod_base = OTHER; note = 2'-deoxy-2'-fluoroadenosine-3'-phosphate
  modified_base 17: mod_base = OTHER; note = 2'-O-methylcytidine-3'-phosphate
  modified_base 18: mod_base = OTHER; note = 2'-deoxy-2'-fluorouridine-3'-phosphate
  modified_base 19: mod_base = OTHER; note = 2'-O-methylguanosine-3'-phosphate
  modified_base 20: mod_base = OTHER; note = 2'-deoxy-2'-fluorouridine-3'-phosphorothioate
  modified_base 21: mod_base = OTHER; note = 2'-O-methyluridine-3'-phosphorothioate
  modified_base 22: mod_base = OTHER; note = 2'-O-methyluridine-3'-phosphate ((2S,4R)-1-[29-[[2-(acetylamino)-2-deoxy-beta-D-galactopyra nosyl]oxy]-14,14-bis[[3-[[3-[[5-[[2-(acetylamino)-2-deoxy-b eta-D-galactopyranosyl]oxy]-1-oxopentyl]amino]propyl]amino] -3-oxopropoxy]methyl]-1,12,19,25-tetraoxo-16-oxa-13,20,24-t riazanonacos-1-yl]-4-hydroxy-2-pyrrolidinyl)methyl ester
ttatagagcaagaacactgttt

SEQ ID NO: 50 - RNA, 22 nt, synthetic construct
  source 1..22: mol_type = other RNA
  modified_base 1: mod_base = OTHER; note = 2'-O-methyladenosine-3'-phosphorothioate
  modified_base 2: mod_base = OTHER; note = 2'-deoxy-2'-fluoroadenosine-3'-phosphorothioate
  modified_base 3: mod_base = OTHER; note = 2'-O-methyladenosine-3'-phosphate
  modified_base 4: mod_base = OTHER; note = 2'-deoxy-2'-fluorocytidine-3'-phosphate
  modified_base 5: mod_base = OTHER; note = 2'-O-methyladenosine-3'-phosphate
  modified_base 6: mod_base = OTHER; note = 2'-deoxy-2'-fluoroguanosine-3'-phosphate
  modified_base 7: mod_base = OTHER; note = 2'-O-methyluridine-3'-phosphate
  modified_base 8: mod_base = OTHER; note = 2'-deoxy-2'-fluoroguanosine-3'-phosphate
  modified_base 9: mod_base = OTHER; note = 2'-O-methyluridine-3'-phosphate
  modified_base 10: mod_base = OTHER; note = 2'-deoxy-2'-fluorouridine-3'-phosphate
  modified_base 11: mod_base = OTHER; note = 2'-deoxy-2'-fluorocytidine-3'-phosphate
  modified_base 12: mod_base = OTHER; note = 2'-deoxy-2'-fluorouridine-3'-phosphate
  modified_base 13: mod_base = OTHER; note = 2'-O-methyluridine-3'-phosphate
  modified_base 14: mod_base = OTHER; note = 2'-deoxy-2'-fluoroguanosine-3'-phosphate
  modified_base 15: mod_base = OTHER; note = 2'-O-methylcytidine-3'-phosphate
  modified_base 16: mod_base = OTHER; note = 2'-deoxy-2'-fluorouridine-3'-phosphate
  modified_base 17: mod_base = OTHER; note = 2'-O-methylcytidine-3'-phosphate
  modified_base 18: mod_base = OTHER; note = 2'-deoxy-2'-fluorouridine-3'-phosphate
  modified_base 19: mod_base = OTHER; note = 2'-O-methyladenosine-3'-phosphate
  modified_base 20: mod_base = OTHER; note = 2'-deoxy-2'-fluorouridine-3'-phosphorothioate
  modified_base 21: mod_base = OTHER; note = 2'-O-methyladenosine-3'-phosphorothioate
  modified_base 22: mod_base = OTHER; note = 2'-deoxy-2'-fluoroadenosine
aaacagtgttcttgctctataa

SEQ ID NO: 51 - RNA, 23 nt, synthetic construct
  source 1..23: mol_type = other RNA
  modified_base 1: mod_base = OTHER; note = 2'-O-methyluridine-3'-phosphorothioate
  modified_base 2: mod_base = OTHER; note = 2'-deoxy-2'-fluorouridine-3'-phosphorothioate
  modified_base 3: mod_base = OTHER; note = 2'-O-methyladenosine-3'-phosphate
  modified_base 4: mod_base = OTHER; note = 2'-deoxy-2'-fluorouridine-3'-phosphate
  modified_base 5: mod_base = OTHER; note = 2'-O-methyladenosine-3'-phosphate
  modified_base 6: mod_base = OTHER; note = 2'-deoxy-2'-fluoroguanosine-3'-phosphate
  modified_base 7: mod_base = OTHER; note = 2'-O-methyladenosine-3'-phosphate
  modified_base 8: mod_base = OTHER; note = 2'-deoxy-2'-fluoroguanosine-3'-phosphate
  modified_base 9: mod_base = OTHER; note = 2'-O-methylcytidine-3'-phosphate
  modified_base 10: mod_base = OTHER; note = 2'-deoxy-2'-fluoroadenosine-3'-phosphate
  modified_base 11: mod_base = OTHER; note = 2'-O-methyladenosine-3'-phosphate
  modified_base 12: mod_base = OTHER; note = 2'-O-methylguanosine-3'-phosphate
  modified_base 13: mod_base = OTHER; note = 2'-O-methyladenosine-3'-phosphate
  modified_base 14: mod_base = OTHER; note = 2'-deoxy-2'-fluoroadenosine-3'-phosphate
  modified_base 15: mod_base = OTHER; note = 2'-O-methylcytidine-3'-phosphate
  modified_base 16: mod_base = OTHER; note = 2'-deoxy-2'-fluoroadenosine-3'-phosphate
  modified_base 17: mod_base = OTHER; note = 2'-O-methylcytidine-3'-phosphate
  modified_base 18: mod_base = OTHER; note = 2'-deoxy-2'-fluorouridine-3'-phosphate
  modified_base 19: mod_base = OTHER; note = 2'-O-methylguanosine-3'-phosphate
  modified_base 20: mod_base = OTHER; note = 2'-deoxy-2'-fluorouridine-3'-phosphate
  modified_base 21: mod_base = OTHER; note = 2'-O-methyluridine-3'-phosphorothioate
  modified_base 22: mod_base = OTHER; note = 2'-O-methyluridine-3'-phosphorothioate
  modified_base 23: mod_base = OTHER; note = 2'-O-methyluridine-3'-phosphate ((2S,4R)-1-[29-[[2-(acetylamino)-2-deoxy-beta-D-galactopyra nosyl]oxy]-14,14-bis[[3-[[3-[[5-[[2-(acetylamino)-2-deoxy-b eta-D-galactopyranosyl]oxy]-1-oxopentyl]amino]propyl]amino] -3-oxopropoxy]methyl]-1,12,19,25-tetraoxo-16-oxa-13,20,24-t riazanonacos-1-yl]-4-hydroxy-2-pyrrolidinyl)methyl ester
ttatagagcaagaacactgtttt

SEQ ID NO: 52 - RNA, 21 nt, synthetic construct
  source 1..21: mol_type = other RNA
  modified_base 1: mod_base = OTHER; note = 2'-deoxy-2'-fluoroadenosine-3'-phosphorothioate
  modified_base 2: mod_base = OTHER; note = 2'-O-methyladenosine-3'-phosphorothioate
  modified_base 3: mod_base = OTHER; note = 2'-deoxy-2'-fluorocytidine-3'-phosphate
  modified_base 4: mod_base = OTHER; note = 2'-O-methyladenosine-3'-phosphate
  modified_base 5: mod_base = OTHER; note = 2'-deoxy-2'-fluoroguanosine-3'-phosphate
  modified_base 6: mod_base = OTHER; note = 2'-O-methyluridine-3'-phosphate
  modified_base 7: mod_base = OTHER; note = 2'-deoxy-2'-fluoroguanosine-3'-phosphate
  modified_base 8: mod_base = OTHER; note = 2'-O-methyluridine-3'-phosphate
  modified_base 9: mod_base = OTHER; note = 2'-deoxy-2'-fluorouridine-3'-phosphate
  modified_base 10: mod_base = OTHER; note = 2'-deoxy-2'-fluorocytidine-3'-phosphate
  modified_base 11: mod_base = OTHER; note = 2'-deoxy-2'-fluorouridine-3'-phosphate
  modified_base 12: mod_base = OTHER; note = 2'-O-methyluridine-3'-phosphate
  modified_base 13: mod_base = OTHER; note = 2'-deoxy-2'-fluoroguanosine-3'-phosphate
  modified_base 14: mod_base = OTHER; note = 2'-O-methylcytidine-3'-phosphate
  modified_base 15: mod_base = OTHER; note = 2'-deoxy-2'-fluorouridine-3'-phosphate
  modified_base 16: mod_base = OTHER; note = 2'-O-methylcytidine-3'-phosphate
  modified_base 17: mod_base = OTHER; note = 2'-deoxy-2'-fluorouridine-3'-phosphate
  modified_base 18: mod_base = OTHER; note = 2'-O-methyladenosine-3'-phosphate
  modified_base 19: mod_base = OTHER; note = 2'-deoxy-2'-fluorouridine-3'-phosphorothioate
  modified_base 20: mod_base = OTHER; note = 2'-O-methyladenosine-3'-phosphorothioate
  modified_base 21: mod_base = OTHER; note = 2'-deoxy-2'-fluoroadenosine
aacagtgttcttgctctataa

SEQ ID NO: 53 - RNA, 21 nt, synthetic construct
  source 1..21: mol_type = other RNA
  modified_base 1: mod_base = OTHER; note = 2'-O-methyluridine-3'-phosphorothioate
  modified_base 2: mod_base = OTHER; note = 2'-deoxy-2'-fluorouridine-3'-phosphorothioate
  modified_base 3: mod_base = OTHER; note = 2'-O-methyladenosine-3'-phosphate
  modified_base 4: mod_base = OTHER; note = 2'-deoxy-2'-fluorouridine-3'-phosphate
  modified_base 5: mod_base = OTHER; note = 2'-O-methyladenosine-3'-phosphate
  modified_base 6: mod_base = OTHER; note = 2'-deoxy-2'-fluoroguanosine-3'-phosphate
  modified_base 7: mod_base = OTHER; note = 2'-O-methyladenosine-3'-phosphate
  modified_base 8: mod_base = OTHER; note = 2'-deoxy-2'-fluoroguanosine-3'-phosphate
  modified_base 9: mod_base = OTHER; note = 2'-O-methylcytidine-3'-phosphate
  modified_base 10: mod_base = OTHER; note = 2'-deoxy-2'-fluoroadenosine-3'-phosphate
  modified_base 11: mod_base = OTHER; note = 2'-O-methyladenosine-3'-phosphate
  modified_base 12: mod_base = OTHER; note = 2'-O-methylguanosine-3'-phosphate
  modified_base 13: mod_base = OTHER; note = 2'-O-methyladenosine-3'-phosphate
  modified_base 14: mod_base = OTHER; note = 2'-deoxy-2'-fluoroadenosine-3'-phosphate
  modified_base 15: mod_base = OTHER; note = 2'-O-methylcytidine-3'-phosphate
  modified_base 16: mod_base = OTHER; note = 2'-deoxy-2'-fluoroadenosine-3'-phosphate
  modified_base 17: mod_base = OTHER; note = 2'-O-methylcytidine-3'-phosphate
  modified_base 18: mod_base = OTHER; note = 2'-deoxy-2'-fluorouridine-3'-phosphate
  modified_base 19: mod_base = OTHER; note = 2'-O-methylguanosine-3'-phosphorothioate
  modified_base 20: mod_base = OTHER; note = 2'-deoxy-2'-fluorouridine-3'-phosphorothioate
  modified_base 21: mod_base = OTHER; note = 2'-O-methyluridine-3'-phosphate ((2S,4R)-1-[29-[[2-(acetylamino)-2-deoxy-beta-D-galactopyra nosyl]oxy]-14,14-bis[[3-[[3-[[5-[[2-(acetylamino)-2-deoxy-b eta-D-galactopyranosyl]oxy]-1-oxopentyl]amino]propyl]amino] -3-oxopropoxy]methyl]-1,12,19,25-tetraoxo-16-oxa-13,20,24-t riazanonacos-1-yl]-4-hydroxy-2-pyrrolidinyl)methyl ester
ttatagagcaagaacactgtt

SEQ ID NO: 54 - RNA, 21 nt, synthetic construct
  source 1..21: mol_type = other RNA
  modified_base 1: mod_base = OTHER; note = 2'-deoxy-2'-fluoroadenosine-3'-phosphorothioate
  modified_base 2: mod_base = OTHER; note = 2'-O-methyladenosine-3'-phosphorothioate
  modified_base 3: mod_base = OTHER; note = 2'-deoxy-2'-fluorocytidine-3'-phosphate
  modified_base 4: mod_base = OTHER; note = 2'-O-methyladenosine-3'-phosphate
  modified_base 5: mod_base = OTHER; note = 2'-deoxy-2'-fluoroguanosine-3'-phosphate
  modified_base 6: mod_base = OTHER; note = 2'-O-methyluridine-3'-phosphate
  modified_base 7: mod_base = OTHER; note = 2'-deoxy-2'-fluoroguanosine-3'-phosphate
  modified_base 8: mod_base = OTHER; note = 2'-O-methyluridine-3'-phosphate
  modified_base 9: mod_base = OTHER; note = 2'-deoxy-2'-fluorouridine-3'-phosphate
  modified_base 10: mod_base = OTHER; note = 2'-deoxy-2'-fluorocytidine-3'-phosphate
  modified_base 11: mod_base = OTHER; note = 2'-deoxy-2'-fluorouridine-3'-phosphate
  modified_base 12: mod_base = OTHER; note = 2'-O-methyluridine-3'-phosphate
  modified_base 13: mod_base = OTHER; note = 2'-deoxy-2'-fluoroguanosine-3'-phosphate
  modified_base 14: mod_base = OTHER; note = 2'-O-methylcytidine-3'-phosphate
  modified_base 15: mod_base = OTHER; note = 2'-deoxy-2'-fluorouridine-3'-phosphate
  modified_base 16: mod_base = OTHER; note = 2'-O-methylcytidine-3'-phosphate
  modified_base 17: mod_base = OTHER; note = 2'-deoxy-2'-fluorouridine-3'-phosphate
  modified_base 18: mod_base = OTHER; note = 2'-O-methyladenosine-3'-phosphate
  modified_base 19: mod_base = OTHER; note = 2'-deoxy-2'-fluorouridine-3'-phosphorothioate
  modified_base 20: mod_base = OTHER; note = 2'-O-methyladenosine-3'-phosphorothioate
  modified_base 21: mod_base = OTHER; note = 2'-deoxy-2'-fluoroadenosine
aacagtgttcttgctctataa

SEQ ID NO: 55 - RNA, 22 nt, synthetic construct
  source 1..22: mol_type = other RNA
  modified_base 1: mod_base = OTHER; note = 2'-O-methyluridine-3'-phosphorothioate
  modified_base 2: mod_base = OTHER; note = 2'-deoxy-2'-fluorouridine-3'-phosphorothioate
  modified_base 3: mod_base = OTHER; note = 2'-O-methyladenosine-3'-phosphate
  modified_base 4: mod_base = OTHER; note = 2'-deoxy-2'-fluorouridine-3'-phosphate
  modified_base 5: mod_base = OTHER; note = 2'-O-methyladenosine-3'-phosphate
  modified_base 6: mod_base = OTHER; note = 2'-deoxy-2'-fluoroguanosine-3'-phosphate
  modified_base 7: mod_base = OTHER; note = 2'-O-methyladenosine-3'-phosphate
  modified_base 8: mod_base = OTHER; note = 2'-deoxy-2'-fluoroguanosine-3'-phosphate
  modified_base 9: mod_base = OTHER; note = 2'-O-methylcytidine-3'-phosphate
  modified_base 10: mod_base = OTHER; note = 2'-deoxy-2'-fluoroadenosine-3'-phosphate
  modified_base 11: mod_base = OTHER; note = 2'-O-methyladenosine-3'-phosphate
  modified_base 12: mod_base = OTHER; note = 2'-O-methylguanosine-3'-phosphate
  modified_base 13: mod_base = OTHER; note = 2'-O-methyladenosine-3'-phosphate
  modified_base 14: mod_base = OTHER; note = 2'-deoxy-2'-fluoroadenosine-3'-phosphate
  modified_base 15: mod_base = OTHER; note = 2'-O-methylcytidine-3'-phosphate
  modified_base 16: mod_base = OTHER; note = 2'-deoxy-2'-fluoroadenosine-3'-phosphate
  modified_base 17: mod_base = OTHER; note = 2'-O-methylcytidine-3'-phosphate
  modified_base 18: mod_base = OTHER; note = 2'-deoxy-2'-fluorouridine-3'-phosphate
  modified_base 19: mod_base = OTHER; note = 2'-O-methylguanosine-3'-phosphate
  modified_base 20: mod_base = OTHER; note = 2'-deoxy-2'-fluorouridine-3'-phosphorothioate
  modified_base 21: mod_base = OTHER; note = 2'-O-methyluridine-3'-phosphorothioate
  modified_base 22: mod_base = OTHER; note = 2'-O-methyluridine-3'-phosphate ((2S,4R)-1-[29-[[2-(acetylamino)-2-deoxy-beta-D-galactopyra nosyl]oxy]-14,14-bis[[3-[[3-[[5-[[2-(acetylamino)-2-deoxy-b eta-D-galactopyranosyl]oxy]-1-oxopentyl]amino]propyl]amino] -3-oxopropoxy]methyl]-1,12,19,25-tetraoxo-16-oxa-13,20,24-t riazanonacos-1-yl]-4-hydroxy-2-pyrrolidinyl)methyl ester
ttatagagcaagaacactgttt

SEQ ID NO: 56 - RNA, 21 nt, synthetic construct
  source 1..21: mol_type = other RNA
  modified_base 1: mod_base = OTHER; note = 2'-deoxy-2'-fluoroadenosine-3'-phosphorothioate
  modified_base 2: mod_base = OTHER; note = 2'-O-methyladenosine-3'-phosphorothioate
  modified_base 3: mod_base = OTHER; note = 2'-deoxy-2'-fluorocytidine-3'-phosphate
  modified_base 4: mod_base = OTHER; note = 2'-O-methyladenosine-3'-phosphate
  modified_base 5: mod_base = OTHER; note = 2'-deoxy-2'-fluoroguanosine-3'-phosphate
  modified_base 6: mod_base = OTHER; note = 2'-O-methyluridine-3'-phosphate
  modified_base 7: mod_base = OTHER; note = 2'-deoxy-2'-fluoroguanosine-3'-phosphate
  modified_base 8: mod_base = OTHER; note = 2'-O-methyluridine-3'-phosphate
  modified_base 9: mod_base = OTHER; note = 2'-deoxy-2'-fluorouridine-3'-phosphate
  modified_base 10: mod_base = OTHER; note = 2'-deoxy-2'-fluorocytidine-3'-phosphate
  modified_base 11: mod_base = OTHER; note = 2'-deoxy-2'-fluorouridine-3'-phosphate
  modified_base 12: mod_base = OTHER; note = 2'-O-methyluridine-3'-phosphate
  modified_base 13: mod_base = OTHER; note = 2'-deoxy-2'-fluoroguanosine-3'-phosphate
  modified_base 14: mod_base = OTHER; note = 2'-O-methylcytidine-3'-phosphate
  modified_base 15: mod_base = OTHER; note = 2'-deoxy-2'-fluorouridine-3'-phosphate
  modified_base 16: mod_base = OTHER; note = 2'-O-methylcytidine-3'-phosphate
  modified_base 17: mod_base = OTHER; note = 2'-deoxy-2'-fluorouridine-3'-phosphate
  modified_base 18: mod_base = OTHER; note = 2'-O-methyladenosine-3'-phosphate
  modified_base 19: mod_base = OTHER; note = 2'-deoxy-2'-fluorouridine-3'-phosphorothioate
  modified_base 20: mod_base = OTHER; note = 2'-O-methyladenosine-3'-phosphorothioate
  modified_base 21: mod_base = OTHER; note = 2'-deoxy-2'-fluoroadenosine
aacagtgttcttgctctataa

SEQ ID NO: 57 - DNA, 25 bp, synthetic construct
  source 1..25: mol_type = other DNA
  modified_base 1: mod_base = OTHER; note = 2'-O-methyluridine-3'-phosphorothioate
  modified_base 2: mod_base = OTHER; note = 2'-deoxy-2'-fluorouridine-3'-phosphorothioate
  modified_base 3: mod_base = OTHER; note = 2'-O-methyladenosine-3'-phosphate
  modified_base 4: mod_base = OTHER; note = 2'-deoxy-2'-fluorouridine-3'-phosphate
  modified_base 5: mod_base = OTHER; note = 2'-O-methyladenosine-3'-phosphate
  modified_base 6: mod_base = OTHER; note = 2'-deoxy-2'-fluoroguanosine-3'-phosphate
  modified_base 7: mod_base = OTHER; note = 2'-O-methyladenosine-3'-phosphate
  modified_base 8: mod_base = OTHER; note = 2'-deoxy-2'-fluoroguanosine-3'-phosphate
  modified_base 9: mod_base = OTHER; note = 2'-O-methylcytidine-3'-phosphate
  modified_base 10: mod_base = OTHER; note = 2'-deoxy-2'-fluoroadenosine-3'-phosphate
  modified_base 11: mod_base = OTHER; note = 2'-O-methyladenosine-3'-phosphate
  modified_base 12: mod_base = OTHER; note = 2'-O-methylguanosine-3'-phosphate
  modified_base 13: mod_base = OTHER; note = 2'-O-methyladenosine-3'-phosphate
  modified_base 14: mod_base = OTHER; note = 2'-deoxy-2'-fluoroadenosine-3'-phosphate
  modified_base 15: mod_base = OTHER; note = 2'-O-methylcytidine-3'-phosphate
  modified_base 16: mod_base = OTHER; note = 2'-deoxy-2'-fluoroadenosine-3'-phosphate
  modified_base 17: mod_base = OTHER; note = 2'-O-methylcytidine-3'-phosphate
  modified_base 18: mod_base = OTHER; note = 2'-deoxy-2'-fluorouridine-3'-phosphate
  modified_base 19: mod_base = OTHER; note = 2'-O-methylguanosine-3'-phosphate
  modified_base 20: mod_base = OTHER; note = 2'-deoxy-2'-fluorouridine-3'-phosphate
  modified_base 21: mod_base = OTHER; note = 2'-O-methyluridine-3'-phosphorothioate
  modified_base 22: mod_base = OTHER; note = 2'-O-methyluridine-3'-phosphorothioate
  modified_base 23: mod_base = OTHER; note = 2'-O-methyluridine-3'-phosphate
  modified_base 25: mod_base = OTHER; note = 2'-deoxythymidine-3'-phosphate ((2S,4R)-1-[29-[[2-(acetylamino)-2-deoxy-beta-D-galactopyra nosyl]oxy]-14,14-bis[[3-[[3-[[5-[[2-(acetylamino)-2-deoxy-b eta-D-galactopyranosyl]oxy]-1-oxopentyl]amino]propyl]amino] -3-oxopropoxy]methyl]-1,12,19,25-tetraoxo-16-oxa-13,20,24-t riazanonacos-1-yl]-4-hydroxy-2-pyrrolidinyl)methyl ester
  misc_feature 1..23: note = RNA
  misc_feature 24..25: note = DNA
ttatagagcaagaacactgtttttt

SEQ ID NO: 58 - RNA, 21 nt, synthetic construct
  source 1..21: mol_type = other RNA
  modified_base 1: mod_base = OTHER; note = 2'-deoxy-2'-fluoroadenosine-3'-phosphorothioate
  modified_base 2: mod_base = OTHER; note = 2'-O-methyladenosine-3'-phosphorothioate
  modified_base 3: mod_base = OTHER; note = 2'-deoxy-2'-fluorocytidine-3'-phosphate
  modified_base 4: mod_base = OTHER; note = 2'-O-methyladenosine-3'-phosphate
  modified_base 5: mod_base = OTHER; note = 2'-deoxy-2'-fluoroguanosine-3'-phosphate
  modified_base 6: mod_base = OTHER; note = 2'-O-methyluridine-3'-phosphate
  modified_base 7: mod_base = OTHER; note = 2'-deoxy-2'-fluoroguanosine-3'-phosphate
  modified_base 8: mod_base = OTHER; note = 2'-O-methyluridine-3'-phosphate
  modified_base 9: mod_base = OTHER; note = 2'-deoxy-2'-fluorouridine-3'-phosphate
  modified_base 10: mod_base = OTHER; note = 2'-deoxy-2'-fluorocytidine-3'-phosphate
  modified_base 11: mod_base = OTHER; note = 2'-deoxy-2'-fluorouridine-3'-phosphate
  modified_base 12: mod_base = OTHER; note = 2'-O-methyluridine-3'-phosphate
  modified_base 13: mod_base = OTHER; note = 2'-deoxy-2'-fluoroguanosine-3'-phosphate
  modified_base 14: mod_base = OTHER; note = 2'-O-methylcytidine-3'-phosphate
  modified_base 15: mod_base = OTHER; note = 2'-deoxy-2'-fluorouridine-3'-phosphate
  modified_base 16: mod_base = OTHER; note = 2'-O-methylcytidine-3'-phosphate
  modified_base 17: mod_base = OTHER; note = 2'-deoxy-2'-fluorouridine-3'-phosphate
  modified_base 18: mod_base = OTHER; note = 2'-O-methyladenosine-3'-phosphate
  modified_base 19: mod_base = OTHER; note = 2'-deoxy-2'-fluorouridine-3'-phosphorothioate
  modified_base 20: mod_base = OTHER; note = 2'-O-methyladenosine-3'-phosphorothioate
  modified_base 21: mod_base = OTHER; note = 2'-deoxy-2'-fluoroadenosine
aacagtgttcttgctctataa

SEQ ID NO: 59 - DNA, 25 bp, synthetic construct
  source 1..25: mol_type = other DNA
  modified_base 1: mod_base = OTHER; note = 2'-O-methyluridine-3'-phosphorothioate
  modified_base 2: mod_base = OTHER; note = 2'-deoxy-2'-fluorouridine-3'-phosphorothioate
  modified_base 3: mod_base = OTHER; note = 2'-O-methyladenosine-3'-phosphate
  modified_base 4: mod_base = OTHER; note = 2'-deoxy-2'-fluorouridine-3'-phosphate
  modified_base 5: mod_base = OTHER; note = 2'-O-methyladenosine-3'-phosphate
  modified_base 6: mod_base = OTHER; note = 2'-deoxy-2'-fluoroguanosine-3'-phosphate
  modified_base 7: mod_base = OTHER; note = 2'-O-methyladenosine-3'-phosphate
  modified_base 8: mod_base = OTHER; note = 2'-deoxy-2'-fluoroguanosine-3'-phosphate
  modified_base 9: mod_base = OTHER; note = 2'-O-methylcytidine-3'-phosphate
  modified_base 10: mod_base = OTHER; note = 2'-deoxy-2'-fluoroadenosine-3'-phosphate
  modified_base 11: mod_base = OTHER; note = 2'-O-methyladenosine-3'-phosphate
  modified_base 12: mod_base = OTHER; note = 2'-O-methylguanosine-3'-phosphate
  modified_base 13: mod_base = OTHER; note = 2'-O-methyladenosine-3'-phosphate
  modified_base 14: mod_base = OTHER; note = 2'-deoxy-2'-fluoroadenosine-3'-phosphate
  modified_base 15: mod_base = OTHER; note = 2'-O-methylcytidine-3'-phosphate
  modified_base 16: mod_base = OTHER; note = 2'-deoxy-2'-fluoroadenosine-3'-phosphate
  modified_base 17: mod_base = OTHER; note = 2'-O-methylcytidine-3'-phosphate
  modified_base 18: mod_base = OTHER; note = 2'-deoxy-2'-fluorouridine-3'-phosphate
  modified_base 19: mod_base = OTHER; note = 2'-O-methylguanosine-3'-phosphate
  modified_base 20: mod_base = OTHER; note = 2'-deoxy-2'-fluorouridine-3'-phosphate
  modified_base 21: mod_base = OTHER; note = 2'-O-methyluridine-3'-phosphate
  modified_base 22: mod_base = OTHER; note = 2'-O-methyluridine-3'-phosphate
  modified_base 23: mod_base = OTHER; note = 2'-O-methyluridine-3'-phosphorothioate
  modified_base 24: mod_base = OTHER; note = 2'-deoxythymidine-3'-phosphorothioate
  modified_base 25: mod_base = OTHER; note = 2'-deoxythymidine-3'-phosphate ((2S,4R)-1-[29-[[2-(acetylamino)-2-deoxy-beta-D-galactopyra nosyl]oxy]-14,14-bis[[3-[[3-[[5-[[2-(acetylamino)-2-deoxy-b eta-D-galactopyranosyl]oxy]-1-oxopentyl]amino]propyl]amino] -3-oxopropoxy]methyl]-1,12,19,25-tetraoxo-16-oxa-13,20,24-t riazanonacos-1-yl]-4-hydroxy-2-pyrrolidinyl)methyl ester
  misc_feature 1..23: note = RNA
  misc_feature 24..25: note = DNA
ttatagagcaagaacactgtttttt

SEQ ID NO: 60 - RNA, 21 nt, synthetic construct
  source 1..21: mol_type = other RNA
  modified_base 1: mod_base = OTHER; note = 2'-deoxy-2'-fluorouridine-3'-phosphorothioate
  modified_base 2: mod_base = OTHER; note = 2'-O-methylguanosine-3'-phosphorothioate
  modified_base 3: mod_base = OTHER; note = 2'-deoxy-2'-fluoroadenosine-3'-phosphate
  modified_base 4: mod_base = OTHER; note = 2'-O-methylcytidine-3'-phosphate
  modified_base 5: mod_base = OTHER; note = 2'-deoxy-2'-fluoroadenosine-3'-phosphate
  modified_base 6: mod_base = OTHER; note = 2'-O-methyladenosine-3'-phosphate
  modified_base 7: mod_base = OTHER; note = 2'-deoxy-2'-fluoroadenosine-3'-phosphate
  modified_base 8: mod_base = OTHER; note = 2'-O-methyladenosine-3'-phosphate
  modified_base 9: mod_base = OTHER; note = 2'-deoxy-2'-fluorouridine-3'-phosphate
  modified_base 10: mod_base = OTHER; note = 2'-deoxy-2'-fluoroadenosine-3'-phosphate
  modified_base 11: mod_base = OTHER; note = 2'-deoxy-2'-fluoroadenosine-3'-phosphate
  modified_base 12: mod_base = OTHER; note = 2'-O-methylcytidine-3'-phosphate
  modified_base 13: mod_base = OTHER; note = 2'-deoxy-2'-fluorouridine-3'-phosphate
  modified_base 14: mod_base = OTHER; note = 2'-O-methylcytidine-3'-phosphate
  modified_base 15: mod_base = OTHER; note = 2'-deoxy-2'-fluoroadenosine-3'-phosphate
  modified_base 16: mod_base = OTHER; note = 2'-O-methylcytidine-3'-phosphate
  modified_base 17: mod_base = OTHER; note = 2'-deoxy-2'-fluorouridine-3'-phosphate
  modified_base 18: mod_base = OTHER; note = 2'-O-methyladenosine-3'-phosphate
  modified_base 19: mod_base = OTHER; note = 2'-deoxy-2'-fluorouridine-3'-phosphate
  modified_base 20: mod_base = OTHER; note = 2'-O-methyladenosine-3'-phosphate
  modified_base 21: mod_base = OTHER; note = 2'-deoxy-2'-fluoroadenosine-3'-phosphate ((2S,4R)-1-[29-[[2-(acetylamino)-2-deoxy-beta-D-galactopyra nosyl]oxy]-14,14-bis[[3-[[3-[[5-[[2-(acetylamino)-2-deoxy-b eta-D-galactopyranosyl]oxy]-1-oxopentyl]amino]propyl]amino] -3-oxopropoxy]methyl]-1,12,19,25-tetraoxo-16-oxa-13,20,24-t riazanonacos-1-yl]-4-hydroxy-2-pyrrolidinyl)methyl ester
tgacaaaataactcactataa

SEQ ID NO: 61 - RNA, 23 nt, synthetic construct
  source 1..23: mol_type = other RNA
  modified_base 1: mod_base = OTHER; note = 2'-O-methyluridine-3'-phosphorothioate
  modified_base 2: mod_base = OTHER; note = 2'-deoxy-2'-fluorouridine-3'-phosphorothioate
  modified_base 3: mod_base = OTHER; note = 2'-O-methyladenosine-3'-phosphate
  modified_base 4: mod_base = OTHER; note = 2'-deoxy-2'-fluorouridine-3'-phosphate
  modified_base 5: mod_base = OTHER; note = 2'-O-methyladenosine-3'-phosphate
  modified_base 6: mod_base = OTHER; note = 2'-deoxy-2'-fluoroguanosine-3'-phosphate
  modified_base 7: mod_base = OTHER; note = 2'-O-methyluridine-3'-phosphate
  modified_base 8: mod_base = OTHER; note = 2'-deoxy-2'-fluoroguanosine-3'-phosphate
  modified_base 9: mod_base = OTHER; note = 2'-O-methyladenosine-3'-phosphate
  modified_base 10: mod_base = OTHER; note = 2'-deoxy-2'-fluoroguanosine-3'-phosphate
  modified_base 11: mod_base = OTHER; note = 2'-O-methyluridine-3'-phosphate
  modified_base 12: mod_base = OTHER; note = 2'-O-methyluridine-3'-phosphate
  modified_base 13: mod_base = OTHER; note = 2'-O-methyladenosine-3'-phosphate
  modified_base 14: mod_base = OTHER; note = 2'-deoxy-2'-fluorouridine-3'-phosphate
  modified_base 15: mod_base = OTHER; note = 2'-O-methyluridine-3'-phosphate
  modified_base 16: mod_base = OTHER; note = 2'-deoxy-2'-fluorouridine-3'-phosphate
  modified_base 17: mod_base = OTHER; note = 2'-O-methyluridine-3'-phosphate
  modified_base 18: mod_base = OTHER; note = 2'-deoxy-2'-fluoroguanosine-3'-phosphate
  modified_base 19: mod_base = OTHER; note = 2'-O-methyluridine-3'-phosphate
  modified_base 20: mod_base = OTHER; note = 2'-deoxy-2'-fluorocytidine-3'-phosphate
  modified_base 21: mod_base = OTHER; note = 2'-O-methyladenosine-3'-phosphorothioate
  modified_base 22: mod_base = OTHER; note = 2'-O-methyladenosine-3'-phosphorothioate
  modified_base 23: mod_base = OTHER; note = 2'-O-methyluridine
ttatagtgagttattttgtcaat

SEQ ID NO: 62 - RNA, 21 nt, synthetic construct
  source 1..21: mol_type = other RNA
  modified_base 1: mod_base = OTHER; note = 2'-deoxy-2'-fluorouridine-3'-phosphorothioate
  modified_base 2: mod_base = OTHER; note = 2'-O-methylguanosine-3'-phosphorothioate
  modified_base 3: mod_base = OTHER; note = 2'-deoxy-2'-fluoroadenosine-3'-phosphate
  modified_base 4: mod_base = OTHER; note = 2'-O-methylcytidine-3'-phosphate
  modified_base 5: mod_base = OTHER; note = 2'-deoxy-2'-fluoroadenosine-3'-phosphate
  modified_base 6: mod_base = OTHER; note = 2'-O-methyladenosine-3'-phosphate
  modified_base 7: mod_base = OTHER; note = 2'-deoxy-2'-fluoroadenosine-3'-phosphate
  modified_base 8: mod_base = OTHER; note = 2'-O-methyladenosine-3'-phosphate
  modified_base 9: mod_base = OTHER; note = 2'-deoxy-2'-fluorouridine-3'-phosphate
  modified_base 10: mod_base = OTHER; note = 2'-deoxy-2'-fluoroadenosine-3'-phosphate
  modified_base 11: mod_base = OTHER; note = 2'-deoxy-2'-fluoroadenosine-3'-phosphate
  modified_base 12: mod_base = OTHER; note = 2'-O-methylcytidine-3'-phosphate
  modified_base 13: mod_base = OTHER; note = 2'-deoxy-2'-fluorouridine-3'-phosphate
  modified_base 14: mod_base = OTHER; note = 2'-O-methylcytidine-3'-phosphate
  modified_base 15: mod_base = OTHER; note = 2'-deoxy-2'-fluoroadenosine-3'-phosphate
  modified_base 16: mod_base = OTHER; note = 2'-O-methylcytidine-3'-phosphate
  modified_base 17: mod_base = OTHER; note = 2'-deoxy-2'-fluorouridine-3'-phosphate
  modified_base 18: mod_base = OTHER; note = 2'-O-methyladenosine-3'-phosphate
  modified_base 19: mod_base = OTHER; note = 2'-deoxy-2'-fluorouridine-3'-phosphorothioate
  modified_base 20: mod_base = OTHER; note = 2'-O-methyladenosine-3'-phosphorothioate
  modified_base 21: mod_base = OTHER; note = 2'-deoxy-2'-fluoroadenosine
tgacaaaataactcactataa

SEQ ID NO: 63 - RNA, 23 nt, synthetic construct
  source 1..23: mol_type = other RNA
  modified_base 1: mod_base = OTHER; note = 2'-O-methyluridine-3'-phosphorothioate
  modified_base 2: mod_base = OTHER; note = 2'-deoxy-2'-fluorouridine-3'-phosphorothioate
  modified_base 3: mod_base = OTHER; note = 2'-O-methyladenosine-3'-phosphate
  modified_base 4: mod_base = OTHER; note = 2'-deoxy-2'-fluorouridine-3'-phosphate
  modified_base 5: mod_base = OTHER; note = 2'-O-methyladenosine-3'-phosphate
  modified_base 6: mod_base = OTHER; note = 2'-deoxy-2'-fluoroguanosine-3'-phosphate
  modified_base 7: mod_base = OTHER; note = 2'-O-methyluridine-3'-phosphate
  modified_base 8: mod_base = OTHER; note = 2'-deoxy-2'-fluoroguanosine-3'-phosphate
  modified_base 9: mod_base = OTHER; note = 2'-O-methyladenosine-3'-phosphate
  modified_base 10: mod_base = OTHER; note = 2'-deoxy-2'-fluoroguanosine-3'-phosphate
  modified_base 11: mod_base = OTHER; note = 2'-O-methyluridine-3'-phosphate
  modified_base 12: mod_base = OTHER; note = 2'-O-methyluridine-3'-phosphate
  modified_base 13: mod_base = OTHER; note = 2'-O-methyladenosine-3'-phosphate
  modified_base 14: mod_base = OTHER; note = 2'-deoxy-2'-fluorouridine-3'-phosphate
  modified_base 15: mod_base = OTHER; note = 2'-O-methyluridine-3'-phosphate
  modified_base 16: mod_base = OTHER; note = 2'-deoxy-2'-fluorouridine-3'-phosphate
  modified_base 17: mod_base = OTHER; note = 2'-O-methyluridine-3'-phosphate
  modified_base 18: mod_base = OTHER; note = 2'-deoxy-2'-fluoroguanosine-3'-phosphate
  modified_base 19: mod_base = OTHER; note = 2'-O-methyluridine-3'-phosphate
  modified_base 20: mod_base = OTHER; note = 2'-deoxy-2'-fluorocytidine-3'-phosphate
  modified_base 21: mod_base = OTHER; note = 2'-O-methyladenosine-3'-phosphorothioate
  modified_base 22: mod_base = OTHER; note = 2'-O-methyladenosine-3'-phosphorothioate
  modified_base 23: mod_base = OTHER; note = 2'-O-methyluridine-3'-phosphate ((2S,4R)-1-[29-[[2-(acetylamino)-2-deoxy-beta-D-galactopyra nosyl]oxy]-14,14-bis[[3-[[3-[[5-[[2-(acetylamino)-2-deoxy-b eta-D-galactopyranosyl]oxy]-1-oxopentyl]amino]propyl]amino] -3-oxopropoxy]methyl]-1,12,19,25-tetraoxo-16-oxa-13,20,24-t riazanonacos-1-yl]-4-hydroxy-2-pyrrolidinyl)methyl ester
ttatagtgagttattttgtcaat

SEQ ID NO: 64 - RNA, 21 nt, synthetic construct
  source 1..21: mol_type = other RNA
  modified_base 1: mod_base = OTHER; note = 2'-deoxy-2'-fluorouridine-3'-phosphorothioate
  modified_base 2: mod_base = OTHER; note = 2'-O-methylguanosine-3'-phosphorothioate
  modified_base 3: mod_base = OTHER; note = 2'-deoxy-2'-fluoroadenosine-3'-phosphate
  modified_base 4: mod_base = OTHER; note = 2'-O-methylcytidine-3'-phosphate
  modified_base 5: mod_base = OTHER; note = 2'-deoxy-2'-fluoroadenosine-3'-phosphate
  modified_base 6: mod_base = OTHER; note = 2'-O-methyladenosine-3'-phosphate
  modified_base 7: mod_base = OTHER; note = 2'-deoxy-2'-fluoroadenosine-3'-phosphate
  modified_base 8: mod_base = OTHER; note = 2'-O-methyladenosine-3'-phosphate
  modified_base 9: mod_base = OTHER; note = 2'-deoxy-2'-fluorouridine-3'-phosphate
  modified_base 10: mod_base = OTHER; note = 2'-deoxy-2'-fluoroadenosine-3'-phosphate
  modified_base 11: mod_base = OTHER; note = 2'-deoxy-2'-fluoroadenosine-3'-phosphate
  modified_base 12: mod_base = OTHER; note = 2'-O-methylcytidine-3'-phosphate
  modified_base 13: mod_base = OTHER; note = 2'-deoxy-2'-fluorouridine-3'-phosphate
  modified_base 14: mod_base = OTHER; note = 2'-O-methylcytidine-3'-phosphate
  modified_base 15: mod_base = OTHER; note = 2'-deoxy-2'-fluoroadenosine-3'-phosphate
  modified_base 16: mod_base = OTHER; note = 2'-O-methylcytidine-3'-phosphate
  modified_base 17: mod_base = OTHER; note = 2'-deoxy-2'-fluorouridine-3'-phosphate
  modified_base 18: mod_base = OTHER; note = 2'-O-methyladenosine-3'-phosphate
  modified_base 19: mod_base = OTHER; note = 2'-deoxy-2'-fluorouridine-3'-phosphorothioate
  modified_base 20: mod_base = OTHER; note = 2'-O-methyladenosine-3'-phosphorothioate
  modified_base 21: mod_base = OTHER; note = 2'-deoxy-2'-fluoroadenosine
tgacaaaataactcactataa

SEQ ID NO: 65 - RNA, 23 nt, synthetic construct
  source 1..23: mol_type = other RNA
  modified_base 1: mod_base = OTHER; note = 2'-O-methyluridine-3'-phosphorothioate
  modified_base 2: mod_base = OTHER; note = 2'-deoxy-2'-fluorouridine-3'-phosphorothioate
  modified_base 3: mod_base = OTHER; note = 2'-O-methyladenosine-3'-phosphate
  modified_base 4: mod_base = OTHER; note = 2'-deoxy-2'-fluorouridine-3'-phosphate
  modified_base 5: mod_base = OTHER; note = 2'-O-methyladenosine-3'-phosphate
  modified_base 6: mod_base = OTHER; note = 2'-deoxy-2'-fluoroguanosine-3'-phosphate
  modified_base 7: mod_base = OTHER; note = 2'-O-methyluridine-3'-phosphate
  modified_base 8: mod_base = OTHER; note = 2'-deoxy-2'-fluoroguanosine-3'-phosphate
  modified_base 9: mod_base = OTHER; note = 2'-O-methyladenosine-3'-phosphate
  modified_base 10: mod_base = OTHER; note = 2'-deoxy-2'-fluoroguanosine-3'-phosphate
  modified_base 11: mod_base = OTHER; note = 2'-O-methyluridine-3'-phosphate
  modified_base 12: mod_base = OTHER; note = 2'-O-methyluridine-3'-phosphate
  modified_base 13: mod_base = OTHER; note = 2'-O-methyladenosine-3'-phosphate
  modified_base 14: mod_base = OTHER; note = 2'-deoxy-2'-fluorouridine-3'-phosphate
  modified_base 15: mod_base = OTHER; note = 2'-O-methyluridine-3'-phosphate
  modified_base 16: mod_base = OTHER; note = 2'-deoxy-2'-fluorouridine-3'-phosphate
  modified_base 17: mod_base = OTHER; note = 2'-O-methyluridine-3'-phosphate
  modified_base 18: mod_base = OTHER; note = 2'-deoxy-2'-fluoroguanosine-3'-phosphate
  modified_base 19: mod_base = OTHER; note = 2'-O-methyluridine-3'-phosphate
  modified_base 20: mod_base = OTHER; note = 2'-deoxy-2'-fluorocytidine-3'-phosphate
  modified_base 21: mod_base = OTHER; note = 2'-O-methyladenosine-3'-phosphate
  modified_base 22: mod_base = OTHER; note = 2'-O-methyladenosine-3'-phosphate
  modified_base 23: mod_base = OTHER; note = 2'-O-methyluridine-3'-phosphate ((2S,4R)-1-[29-[[2-(acetylamino)-2-deoxy-beta-D-galactopyra nosyl]oxy]-14,14-bis[[3-[[3-[[5-[[2-(acetylamino)-2-deoxy-b eta-D-galactopyranosyl]oxy]-1-oxopentyl]amino]propyl]amino] -3-oxopropoxy]methyl]-1,12,19,25-tetraoxo-16-oxa-13,20,24-t riazanonacos-1-yl]-4-hydroxy-2-pyrrolidinyl)methyl ester
ttatagtgagttattttgtcaat

SEQ ID NO: 66 - RNA, 21 nt, synthetic construct
  source 1..21: mol_type = other RNA
  modified_base 1: mod_base = OTHER; note = 2'-O-methylguanosine-3'-phosphorothioate
  modified_base 2: mod_base = OTHER; note = 2'-O-methyladenosine-3'-phosphorothioate
  modified_base 3: mod_base = OTHER; note = 2'-O-methyladenosine-3'-phosphate
  modified_base 4: mod_base = OTHER; note = 2'-O-methyladenosine-3'-phosphate
  modified_base 5: mod_base = OTHER; note = 2'-O-methylcytidine-3'-phosphate
  modified_base 6: mod_base = OTHER; note = 2'-O-methyluridine-3'-phosphate
  modified_base 7: mod_base = OTHER; note = 2'-deoxy-2'-fluorocytidine-3'-phosphate
  modified_base 8: mod_base = OTHER; note = 2'-O-methyladenosine-3'-phosphate
  modified_base 9: mod_base = OTHER; note = 2'-deoxy-2'-fluoroadenosine-3'-phosphate
  modified_base 10: mod_base = OTHER; note = 2'-deoxy-2'-fluorouridine-3'-phosphate
  modified_base 11: mod_base = OTHER; note = 2'-deoxy-2'-fluoroadenosine-3'-phosphate
  modified_base 12: mod_base = OTHER; note = 2'-O-methyladenosine-3'-phosphate
  modified_base 13: mod_base = OTHER; note = 2'-O-methyladenosine-3'-phosphate
  modified_base 14: mod_base = OTHER; note = 2'-O-methylguanosine-3'-phosphate
  modified_base 15: mod_base = OTHER; note = 2'-O-methyluridine-3'-phosphate
  modified_base 16: mod_base = OTHER; note = 2'-O-methylguanosine-3'-phosphate
  modified_base 17: mod_base = OTHER; note = 2'-O-methylcytidine-3'-phosphate
  modified_base 18: mod_base = OTHER; note = 2'-O-methyluridine-3'-phosphate
  modified_base 19: mod_base = OTHER; note = 2'-O-methyluridine-3'-phosphorothioate
  modified_base 20: mod_base = OTHER; note = 2'-O-methyluridine-3'-phosphorothioate
  modified_base 21: mod_base = OTHER; note = 2'-O-methyladenosine
gaaactcaataaagtgcttta

SEQ ID NO: 67 - RNA, 23 nt, synthetic construct
  source 1..23: mol_type = other RNA
  modified_base 1: mod_base = OTHER; note = 2'-O-methyluridine-3'-phosphorothioate
  modified_base 2: mod_base = OTHER; note = 2'-deoxy-2'-fluoroadenosine-3'-phosphorothioate
  modified_base 3: mod_base = OTHER; note = 2'-O-methyladenosine-3'-phosphate
  modified_base 4: mod_base = OTHER; note = 2'-O-methyladenosine-3'-phosphate
  modified_base 5: mod_base = OTHER; note = 2'-O-methylguanosine-3'-phosphate
  modified_base 6: mod_base = OTHER; note = 2'-deoxy-2'-fluorocytidine-3'-phosphate
  modified_base 7: mod_base = OTHER; note = 2'-O-methyladenosine-3'-phosphate
  modified_base 8: mod_base = OTHER; note = 2'-O-methylcytidine-3'-phosphate
  modified_base 9: mod_base = OTHER; note = 2'-O-methyluridine-3'-phosphate
  modified_base 10: mod_base = OTHER; note = 2'-O-methyluridine-3'-phosphate
  modified_base 11: mod_base = OTHER; note = 2'-O-methyluridine-3'-phosphate
  modified_base 12: mod_base = OTHER; note = 2'-O-methyladenosine-3'-phosphate
  modified_base 13: mod_base = OTHER; note = 2'-O-methyluridine-3'-phosphate
  modified_base 14: mod_base = OTHER; note = 2'-deoxy-2'-fluorouridine-3'-phosphate
  modified_base 15: mod_base = OTHER; note = 2'-O-methylguanosine-3'-phosphate
  modified_base 16: mod_base = OTHER; note = 2'-deoxy-2'-fluoroadenosine-3'-phosphate
  modified_base 17: mod_base = OTHER; note = 2'-O-methylguanosine-3'-phosphate
  modified_base 18: mod_base = OTHER; note = 2'-O-methyluridine-3'-phosphate
  modified_base 19: mod_base = OTHER; note = 2'-O-methyluridine-3'-phosphate
  modified_base 20: mod_base = OTHER; note = 2'-O-methyluridine-3'-phosphate
  modified_base 21: mod_base = OTHER; note = 2'-O-methylcytidine-3'-phosphorothioate
  modified_base 22: mod_base = OTHER; note = 2'-O-methyluridine-3'-phosphorothioate
  modified_base 23: mod_base = OTHER; note = 2'-O-methylguanosine-3'-phosphate ((2S,4R)-1-[29-[[2-(acetylamino)-2-deoxy-beta-D-galactopyra nosyl]oxy]-14,14-bis[[3-[[3-[[5-[[2-(acetylamino)-2-deoxy-b eta-D-galactopyranosyl]oxy]-1-oxopentyl]amino]propyl]amino] -3-oxopropoxy]methyl]-1,12,19,25-tetraoxo-16-oxa-13,20,24-t riazanonacos-1-yl]-4-hydroxy-2-pyrrolidinyl)methyl ester
taaagcactttattgagtttctg

SEQ ID NO: 68 - RNA, 21 nt, synthetic construct
  source 1..21: mol_type = other RNA
  modified_base 1: mod_base = OTHER; note = 2'-O-methylguanosine-3'-phosphorothioate
  modified_base 2: mod_base = OTHER; note = 2'-O-methyladenosine-3'-phosphorothioate
  modified_base 3: mod_base = OTHER; note = 2'-O-methyladenosine-3'-phosphate
  modified_base 4: mod_base = OTHER; note = 2'-O-methyladenosine-3'-phosphate
  modified_base 5: mod_base = OTHER; note = 2'-O-methylcytidine-3'-phosphate
  modified_base 6: mod_base = OTHER; note = 2'-O-methyluridine-3'-phosphate
  modified_base 7: mod_base = OTHER; note = 2'-deoxy-2'-fluorocytidine-3'-phosphate
  modified_base 8: mod_base = OTHER; note = 2'-O-methyladenosine-3'-phosphate
  modified_base 9: mod_base = OTHER; note = 2'-deoxy-2'-fluoroadenosine-3'-phosphate
  modified_base 10: mod_base = OTHER; note = 2'-deoxy-2'-fluorouridine-3'-phosphate
  modified_base 11: mod_base = OTHER; note = 2'-deoxy-2'-fluoroadenosine-3'-phosphate
  modified_base 12: mod_base = OTHER; note = 2'-O-methyladenosine-3'-phosphate
  modified_base 13: mod_base = OTHER; note = 2'-O-methyladenosine-3'-phosphate
  modified_base 14: mod_base = OTHER; note = 2'-O-methylguanosine-3'-phosphate
  modified_base 15: mod_base = OTHER; note = 2'-O-methyluridine-3'-phosphate
  modified_base 16: mod_base = OTHER; note = 2'-O-methylguanosine-3'-phosphate
  modified_base 17: mod_base = OTHER; note = 2'-O-methylcytidine-3'-phosphate
  modified_base 18: mod_base = OTHER; note = 2'-O-methyluridine-3'-phosphate
  modified_base 19: mod_base = OTHER; note = 2'-O-methyluridine-3'-phosphorothioate
  modified_base 20: mod_base = OTHER; note = 2'-O-methyluridine-3'-phosphorothioate
  modified_base 21: mod_base = OTHER; note = 2'-O-methyladenosine
gaaactcaataaagtgcttta

SEQ ID NO: 69 - RNA, 23 nt, synthetic construct
  source 1..23: mol_type = other RNA
  modified_base 1: mod_base = OTHER; note = 2'-O-methyluridine-3'-phosphorothioate
  modified_base 2: mod_base = OTHER; note = 2'-deoxy-2'-fluoroadenosine-3'-phosphorothioate
  modified_base 3: mod_base = OTHER; note = 2'-O-methyladenosine-3'-phosphate
  modified_base 4: mod_base = OTHER; note = 2'-O-methyladenosine-3'-phosphate
  modified_base 5: mod_base = OTHER; note = 2'-O-methylguanosine-3'-phosphate
  modified_base 6: mod_base = OTHER; note = 2'-deoxy-2'-fluorocytidine-3'-phosphate
  modified_base 7: mod_base = OTHER; note = 2'-O-methyladenosine-3'-phosphate
  modified_base 8: mod_base = OTHER; note = 2'-O-methylcytidine-3'-phosphate
  modified_base 9: mod_base = OTHER; note = 2'-O-methyluridine-3'-phosphate
  modified_base 10: mod_base = OTHER; note = 2'-O-methyluridine-3'-phosphate
  modified_base 11: mod_base = OTHER; note = 2'-O-methyluridine-3'-phosphate
  modified_base 12: mod_base = OTHER; note = 2'-O-methyladenosine-3'-phosphate
  modified_base 13: mod_base = OTHER; note = 2'-O-methyluridine-3'-phosphate
  modified_base 14: mod_base = OTHER; note = 2'-deoxy-2'-fluorouridine-3'-phosphate
  modified_base 15: mod_base = OTHER; note = 2'-O-methylguanosine-3'-phosphate
  modified_base 16: mod_base = OTHER; note = 2'-deoxy-2'-fluoroadenosine-3'-phosphate
  modified_base 17: mod_base = OTHER; note = 2'-O-methylguanosine-3'-phosphate
  modified_base 18: mod_base = OTHER; note = 2'-O-methyluridine-3'-phosphate
  modified_base 19: mod_base = OTHER; note = 2'-O-methyluridine-3'-phosphate
  modified_base 20: mod_base = OTHER; note = 2'-O-methyluridine-3'-phosphate
  modified_base 21: mod_base = OTHER; note = 2'-O-methylcytidine-3'-phosphate
  modified_base 22: mod_base = OTHER; note = 2'-O-methyluridine-3'-phosphate
  modified_base 23: mod_base = OTHER; note = 2'-O-methylguanosine-3'-phosphate ((2S,4R)-1-[29-[[2-(acetylamino)-2-deoxy-beta-D-galactopyra nosyl]oxy]-14,14-bis[[3-[[3-[[5-[[2-(acetylamino)-2-deoxy-b eta-D-galactopyranosyl]oxy]-1-oxopentyl]amino]propyl]amino] -3-oxopropoxy]methyl]-1,12,19,25-tetraoxo-16-oxa-13,20,24-t riazanonacos-1-yl]-4-hydroxy-2-pyrrolidinyl)methyl ester
taaagcactttattgagtttctg

SEQ ID NO: 70 - RNA, 21 nt, synthetic construct
  source 1..21: mol_type = other RNA
  modified_base 1: mod_base = OTHER; note = 2'-O-methylguanosine-3'-phosphorothioate
  modified_base 2: mod_base = OTHER; note = 2'-O-methyladenosine-3'-phosphorothioate
  modified_base 3: mod_base = OTHER; note = 2'-O-methyladenosine-3'-phosphate
  modified_base 4: mod_base = OTHER; note = 2'-O-methyladenosine-3'-phosphate
  modified_base 5: mod_base = OTHER; note = 2'-O-methylcytidine-3'-phosphate
  modified_base 6: mod_base = OTHER; note = 2'-O-methyluridine-3'-phosphate
  modified_base 7: mod_base = OTHER; note = 2'-deoxy-2'-fluorocytidine-3'-phosphate
  modified_base 8: mod_base = OTHER; note = 2'-O-methyladenosine-3'-phosphate
  modified_base 9: mod_base = OTHER; note = 2'-deoxy-2'-fluoroadenosine-3'-phosphate
  modified_base 10: mod_base = OTHER; note = 2'-deoxy-2'-fluorouridine-3'-phosphate
  modified_base 11: mod_base = OTHER; note = 2'-deoxy-2'-fluoroadenosine-3'-phosphate
  modified_base 12: mod_base = OTHER; note = 2'-O-methyladenosine-3'-phosphate
  modified_base 13: mod_base = OTHER; note = 2'-O-methyladenosine-3'-phosphate
  modified_base 14: mod_base = OTHER; note = 2'-O-methylguanosine-3'-phosphate
  modified_base 15: mod_base = OTHER; note = 2'-O-methyluridine-3'-phosphate
  modified_base 16: mod_base = OTHER; note = 2'-O-methylguanosine-3'-phosphate
  modified_base 17: mod_base = OTHER; note = 2'-O-methylcytidine-3'-phosphate
  modified_base 18: mod_base = OTHER; note = 2'-O-methyluridine-3'-phosphate
  modified_base 19: mod_base = OTHER; note = 2'-O-methyluridine-3'-phosphate
  modified_base 20: mod_base = OTHER; note = 2'-O-methyluridine-3'-phosphate
  modified_base 21: mod_base = OTHER; note = 2'-O-methyladenosine-3'-phosphate ((2S,4R)-1-[29-[[2-(acetylamino)-2-deoxy-beta-D-galactopyra nosyl]oxy]-14,14-bis[[3-[[3-[[5-[[2-(acetylamino)-2-deoxy-b eta-D-galactopyranosyl]oxy]-1-oxopentyl]amino]propyl]amino] -3-oxopropoxy]methyl]-1,12,19,25-tetraoxo-16-oxa-13,20,24-t riazanonacos-1-yl]-4-hydroxy-2-pyrrolidinyl)methyl ester
gaaactcaataaagtgcttta

SEQ ID NO: 71 - RNA, 23 nt, synthetic construct
  source 1..23: mol_type = other RNA
  modified_base 1: mod_base = OTHER; note = 2'-O-methyluridine-3'-phosphorothioate
  modified_base 2: mod_base = OTHER; note = 2'-deoxy-2'-fluoroadenosine-3'-phosphorothioate
  modified_base 3: mod_base = OTHER; note = 2'-O-methyladenosine-3'-phosphate
  modified_base 4: mod_base = OTHER; note = 2'-O-methyladenosine-3'-phosphate
  modified_base 5: mod_base = OTHER; note = 2'-O-methylguanosine-3'-phosphate
  modified_base 6: mod_base = OTHER; note = 2'-deoxy-2'-fluorocytidine-3'-phosphate
  modified_base 7: mod_base = OTHER; note = 2'-O-methyladenosine-3'-phosphate
  modified_base 8: mod_base = OTHER; note = 2'-O-methylcytidine-3'-phosphate
  modified_base 9: mod_base = OTHER; note = 2'-O-methyluridine-3'-phosphate
  modified_base 10: mod_base = OTHER; note = 2'-O-methyluridine-3'-phosphate
  modified_base 11: mod_base = OTHER; note = 2'-O-methyluridine-3'-phosphate
  modified_base 12: mod_base = OTHER; note = 2'-O-methyladenosine-3'-phosphate
  modified_base 13: mod_base = OTHER; note = 2'-O-methyluridine-3'-phosphate
  modified_base 14: mod_base = OTHER; note = 2'-deoxy-2'-fluorouridine-3'-phosphate
  modified_base 15: mod_base = OTHER; note = 2'-O-methylguanosine-3'-phosphate
  modified_base 16: mod_base = OTHER; note = 2'-deoxy-2'-fluoroadenosine-3'-phosphate
  modified_base 17: mod_base = OTHER; note = 2'-O-methylguanosine-3'-phosphate
  modified_base 18: mod_base = OTHER; note = 2'-O-methyluridine-3'-phosphate
  modified_base 19: mod_base = OTHER; note = 2'-O-methyluridine-3'-phosphate
  modified_base 20: mod_base = OTHER; note = 2'-O-methyluridine-3'-phosphate
  modified_base 21: mod_base = OTHER; note = 2'-O-methylcytidine-3'-phosphorothioate
  modified_base 22: mod_base = OTHER; note = 2'-O-methyluridine-3'-phosphorothioate
  modified_base 23: mod_base = OTHER; note = 2'-O-methylguanosine
taaagcactttattgagtttctg

SEQ ID NO: 72 - RNA, 23 nt, synthetic construct
  source 1..23: mol_type = other RNA
  modified_base 1: mod_base = OTHER; note = 2'-O-methyluridine-3'-phosphorothioate 5'-(E)-Vinylphosphonate
  modified_base 2: mod_base = OTHER; note = 2'-deoxy-2'-fluorouridine-3'-phosphorothioate
  modified_base 3: mod_base = OTHER; note = 2'-O-methyladenosine-3'-phosphate
  modified_base 4: mod_base = OTHER; note = 2'-deoxy-2'-fluorouridine-3'-phosphorothioate
  modified_base 5: mod_base = OTHER; note = 2'-O-methyladenosine-3'-phosphate
  modified_base 6: mod_base = OTHER; note = 2'-deoxy-2'-fluoroguanosine-3'-phosphorothioate
  modified_base 7: mod_base = OTHER; note = 2'-O-methyladenosine-3'-phosphate
  modified_base 8: mod_base = OTHER; note = 2'-deoxy-2'-fluoroguanosine-3'-phosphorothioate
  modified_base 9: mod_base = OTHER; note = 2'-O-methylcytidine-3'-phosphate
  modified_base 10: mod_base = OTHER; note = 2'-deoxy-2'-fluoroadenosine-3'-phosphorothioate
  modified_base 11: mod_base = OTHER; note = 2'-O-methyladenosine-3'-phosphate
  modified_base 12: mod_base = OTHER; note = 2'-O-methylguanosine-3'-phosphorothioate
  modified_base 13: mod_base = OTHER; note = 2'-O-methyladenosine-3'-phosphate
  modified_base 14: mod_base = OTHER; note = 2'-deoxy-2'-fluoroadenosine-3'-phosphorothioate
  modified_base 15: mod_base = OTHER; note = 2'-O-methylcytidine-3'-phosphate
  modified_base 16: mod_base = OTHER; note = 2'-deoxy-2'-fluoroadenosine-3'-phosphorothioate
  modified_base 17: mod_base = OTHER; note = 2'-O-methylcytidine-3'-phosphate
  modified_base 18: mod_base = OTHER; note = 2'-deoxy-2'-fluorouridine-3'-phosphorothioate
  modified_base 19: mod_base = OTHER; note = 2'-O-methylguanosine-3'-phosphate
  modified_base 20: mod_base = OTHER; note = 2'-deoxy-2'-fluorouridine-3'-phosphorothioate
  modified_base 21: mod_base = OTHER; note = 2'-O-methyluridine-3'-phosphorothioate
  modified_base 22: mod_base = OTHER; note = 2'-O-methyluridine-3'-phosphorothioate
  modified_base 23: mod_base = OTHER; note = 2'-O-methyluridine-3'-phosphate ((2S,4R)-1-[29-[[2-(acetylamino)-2-deoxy-beta-D-galactopyra nosyl]oxy]-14,14-bis[[3-[[3-[[5-[[2-(acetylamino)-2-deoxy-b eta-D-galactopyranosyl]oxy]-1-oxopentyl]amino]propyl]amino] -3-oxopropoxy]methyl]-1,12,19,25-tetraoxo-16-oxa-13,20,24-t riazanonacos-1-yl]-4-hydroxy-2-pyrrolidinyl)methyl ester
ttatagagcaagaacactgtttt

SEQ ID NO: 73 - RNA, 23 nt, synthetic construct
  source 1..23: mol_type = other RNA
  modified_base 1: mod_base = OTHER; note = 2'-O-methyluridine-3'-phosphorothioate 5'-(E)-Vinylphosphonate
  modified_base 2: mod_base = OTHER; note = 2'-deoxy-2'-fluorouridine-3'-phosphorothioate
  modified_base 3: mod_base = OTHER; note = 2'-O-methyladenosine-3'-phosphate
  modified_base 4: mod_base = OTHER; note = 2'-O-methyluridine-3'-phosphorothioate
  modified_base 5: mod_base = OTHER; note = 2'-O-methyladenosine-3'-phosphate
  modified_base 6: mod_base = OTHER; note = 2'-deoxy-2'-fluoroguanosine-3'-phosphorothioate
  modified_base 7: mod_base = OTHER; note = 2'-O-methyladenosine-3'-phosphate
  modified_base 8: mod_base = OTHER; note = 2'-deoxy-2'-fluoroguanosine-3'-phosphorothioate
  modified_base 9: mod_base = OTHER; note = 2'-deoxy-2'-fluorocytidine-3'-phosphorothioate
  modified_base 10: mod_base = OTHER; note = 2'-O-methyladenosine-3'-phosphate
  modified_base 11: mod_base = OTHER; note = 2'-O-methyladenosine-3'-phosphorothioate
  modified_base 12: mod_base = OTHER; note = 2'-O-methylguanosine-3'-phosphate
  modified_base 13: mod_base = OTHER; note = 2'-O-methyladenosine-3'-phosphorothioate
  modified_base 14: mod_base = OTHER; note = 2'-deoxy-2'-fluoroadenosine-3'-phosphorothioate
  modified_base 15: mod_base = OTHER; note = 2'-O-methylcytidine-3'-phosphate
  modified_base 16: mod_base = OTHER; note = 2'-deoxy-2'-fluoroadenosine-3'-phosphorothioate
  modified_base 17: mod_base = OTHER; note = 2'-O-methylcytidine-3'-phosphate
  modified_base 18: mod_base = OTHER; note = 2'-O-methyluridine-3'-phosphorothioate
  modified_base 19: mod_base = OTHER; note = 2'-O-methylguanosine-3'-phosphate
  modified_base 20: mod_base = OTHER; note = 2'-O-methyluridine-3'-phosphorothioate
  modified_base 21: mod_base = OTHER; note = 2'-O-methyluridine-3'-phosphorothioate
  modified_base 22: mod_base = OTHER; note = 2'-O-methyluridine-3'-phosphorothioate
  modified_base 23: mod_base = OTHER; note = 2'-O-methyluridine-3'-phosphate ((2S,4R)-1-[29-[[2-(acetylamino)-2-deoxy-beta-D-galactopyra nosyl]oxy]-14,14-bis[[3-[[3-[[5-[[2-(acetylamino)-2-deoxy-b eta-D-galactopyranosyl]oxy]-1-oxopentyl]amino]propyl]amino] -3-oxopropoxy]methyl]-1,12,19,25-tetraoxo-16-oxa-13,20,24-t riazanonacos-1-yl]-4-hydroxy-2-pyrrolidinyl)methyl ester
ttatagagcaagaacactgtttt

SEQ ID NO: 74 - RNA, 21 nt, synthetic construct
  source 1..21: mol_type = other RNA
  modified_base 1: mod_base = OTHER; note = 2'-deoxy-2'-fluoroadenosine-3'-phosphorothioate
  modified_base 2: mod_base = OTHER; note = 2'-O-methyladenosine-3'-phosphorothioate
  modified_base 3: mod_base = OTHER; note = 2'-deoxy-2'-fluorocytidine-3'-phosphate
  modified_base 4: mod_base = OTHER; note = 2'-O-methyladenosine-3'-phosphate
  modified_base 5: mod_base = OTHER; note = 2'-deoxy-2'-fluoroguanosine-3'-phosphate
  modified_base 6: mod_base = OTHER; note = 2'-O-methyluridine-3'-phosphate
  modified_base 7: mod_base = OTHER; note = 2'-deoxy-2'-fluoroguanosine-3'-phosphate
  modified_base 8: mod_base = OTHER; note = 2'-O-methyluridine-3'-phosphate
  modified_base 9: mod_base = OTHER; note = 2'-deoxy-2'-fluorouridine-3'-phosphate
  modified_base 10: mod_base = OTHER; note = 2'-deoxy-2'-fluorocytidine-3'-phosphate
  modified_base 11: mod_base = OTHER; note = 2'-deoxy-2'-fluorouridine-3'-phosphate
  modified_base 12: mod_base = OTHER; note = 2'-O-methyluridine-3'-phosphate
  modified_base 13: mod_base = OTHER; note = 2'-deoxy-2'-fluoroguanosine-3'-phosphate
  modified_base 14: mod_base = OTHER; note = 2'-O-methylcytidine-3'-phosphate
  modified_base 15: mod_base = OTHER; note = 2'-deoxy-2'-fluorouridine-3'-phosphate
  modified_base 16: mod_base = OTHER; note = 2'-O-methylcytidine-3'-phosphate
  modified_base 17: mod_base = OTHER; note = 2'-deoxy-2'-fluorouridine-3'-phosphate
  modified_base 18: mod_base = OTHER; note = 2'-O-methyladenosine-3'-phosphate
  modified_base 19: mod_base = OTHER; note = 2'-deoxy-2'-fluorouridine-3'-phosphate
  modified_base 20: mod_base = OTHER; note = 2'-O-methyladenosine-3'-phosphate
  modified_base 21: mod_base = OTHER; note = 2'-deoxy-2'-fluoroadenosine-3'-phosphate ((2S,4R)-1-[29-[[2-(acetylamino)-2-deoxy-beta-D-galactopyra nosyl]oxy]-14,14-bis[[3-[[3-[[5-[[2-(acetylamino)-2-deoxy-b eta-D-galactopyranosyl]oxy]-1-oxopentyl]amino]propyl]amino] -3-oxopropoxy]methyl]-1,12,19,25-tetraoxo-16-oxa-13,20,24-t riazanonacos-1-yl]-4-hydroxy-2-pyrrolidinyl)methyl ester
aacagtgttcttgctctataa

SEQ ID NO: 75 - RNA, 23 nt, synthetic construct
  source 1..23: mol_type = other RNA
  modified_base 1: mod_base = OTHER; note = 2'-O-methyluridine-3'-phosphorothioate
  modified_base 2: mod_base = OTHER; note = 2'-deoxy-2'-fluorouridine-3'-phosphorothioate
  modified_base 3: mod_base = OTHER; note = 2'-O-methyladenosine-3'-phosphate
  modified_base 4: mod_base = OTHER; note = 2'-deoxy-2'-fluorouridine-3'-phosphate
  modified_base 5: mod_base = OTHER; note = 2'-O-methyladenosine-3'-phosphate
  modified_base 6: mod_base = OTHER; note = 2'-deoxy-2'-fluoroguanosine-3'-phosphate
  modified_base 7: mod_base = OTHER; note = 2'-O-methyladenosine-3'-phosphate
  modified_base 8: mod_base = OTHER; note = 2'-deoxy-2'-fluoroguanosine-3'-phosphate
  modified_base 9: mod_base = OTHER; note = 2'-O-methylcytidine-3'-phosphate
  modified_base 10: mod_base = OTHER; note = 2'-deoxy-2'-fluoroadenosine-3'-phosphate
  modified_base 11: mod_base = OTHER; note = 2'-O-methyladenosine-3'-phosphate
  modified_base 12: mod_base = OTHER; note = 2'-O-methylguanosine-3'-phosphate
  modified_base 13: mod_base = OTHER; note = 2'-O-methyladenosine-3'-phosphate
  modified_base 14: mod_base = OTHER; note = 2'-deoxy-2'-fluoroadenosine-3'-phosphate
  modified_base 15: mod_base = OTHER; note = 2'-O-methylcytidine-3'-phosphate
  modified_base 16: mod_base = OTHER; note = 2'-deoxy-2'-fluoroadenosine-3'-phosphate
  modified_base 17: mod_base = OTHER; note = 2'-O-methylcytidine-3'-phosphate
  modified_base 18: mod_base = OTHER; note = 2'-deoxy-2'-fluorouridine-3'-phosphate
  modified_base 19: mod_base = OTHER; note = 2'-O-methylguanosine-3'-phosphate
  modified_base 20: mod_base = OTHER; note = 2'-deoxy-2'-fluorouridine-3'-phosphate
  modified_base 21: mod_base = OTHER; note = 2'-O-methyluridine-3'-phosphorothioate
  modified_base 22: mod_base = OTHER; note = 2'-O-methyluridine-3'-phosphorothioate
  modified_base 23: mod_base = OTHER; note = 2'-O-methyluridine
ttatagagcaagaacactgtttt

SEQ ID NO: 76 - RNA, 21 nt, synthetic construct
  source 1..21: mol_type = other RNA
  modified_base 1: mod_base = OTHER; note = 2'-deoxy-2'-fluoroadenosine-3'-phosphorothioate
  modified_base 2: mod_base = OTHER; note = 2'-O-methyladenosine-3'-phosphorothioate
  modified_base 3: mod_base = OTHER; note = 2'-deoxy-2'-fluorocytidine-3'-phosphate
  modified_base 4: mod_base = OTHER; note = 2'-O-methyladenosine-3'-phosphate
  modified_base 5: mod_base = OTHER; note = 2'-deoxy-2'-fluoroguanosine-3'-phosphate
  modified_base 6: mod_base = OTHER; note = 2'-O-methyluridine-3'-phosphate
  modified_base 7: mod_base = OTHER; note = 2'-deoxy-2'-fluoroguanosine-3'-phosphate
  modified_base 8: mod_base = OTHER; note = 2'-O-methyluridine-3'-phosphate
  modified_base 9: mod_base = OTHER; note = 2'-deoxy-2'-fluorouridine-3'-phosphate
  modified_base 10: mod_base = OTHER; note = 2'-deoxy-2'-fluorocytidine-3'-phosphate
  modified_base 11: mod_base = OTHER; note = 2'-deoxy-2'-fluorouridine-3'-phosphate
  modified_base 12: mod_base = OTHER; note = 2'-O-methyluridine-3'-phosphate
  modified_base 13: mod_base = OTHER; note = 2'-deoxy-2'-fluoroguanosine-3'-phosphate
  modified_base 14: mod_base = OTHER; note = 2'-O-methylcytidine-3'-phosphate
  modified_base 15: mod_base = OTHER; note = 2'-deoxy-2'-fluorouridine-3'-phosphate
  modified_base 16: mod_base = OTHER; note = 2'-O-methylcytidine-3'-phosphate
  modified_base 17: mod_base = OTHER; note = 2'-deoxy-2'-fluorouridine-3'-phosphate
  modified_base 18: mod_base = OTHER; note = 2'-O-methyladenosine-3'-phosphate
  modified_base 19: mod_base = OTHER; note = 2'-deoxy-2'-fluorouridine-3'-phosphorothioate
  modified_base 20: mod_base = OTHER; note = 2'-O-methyladenosine-3'-phosphorothioate
  modified_base 21: mod_base = OTHER; note = 2'-deoxy-2'-fluoroadenosine
aacagtgttcttgctctataa

SEQ ID NO: 77 - RNA, 23 nt, synthetic construct
  source 1..23: mol_type = other RNA
  modified_base 1: mod_base = OTHER; note = 2'-O-methyluridine-3'-phosphorothioate
  modified_base 2: mod_base = OTHER; note = 2'-deoxy-2'-fluorouridine-3'-phosphorothioate
  modified_base 3: mod_base = OTHER; note = 2'-O-methyladenosine-3'-phosphate
  modified_base 4: mod_base = OTHER; note = 2'-deoxy-2'-fluorouridine-3'-phosphate
  modified_base 5: mod_base = OTHER; note = 2'-O-methyladenosine-3'-phosphate
  modified_base 6: mod_base = OTHER; note = 2'-deoxy-2'-fluoroguanosine-3'-phosphate
  modified_base 7: mod_base = OTHER; note = 2'-O-methyladenosine-3'-phosphate
  modified_base 8: mod_base = OTHER; note = 2'-deoxy-2'-fluoroguanosine-3'-phosphate
  modified_base 9: mod_base = OTHER; note = 2'-O-methylcytidine-3'-phosphate
  modified_base 10: mod_base = OTHER; note = 2'-deoxy-2'-fluoroadenosine-3'-phosphate
  modified_base 11: mod_base = OTHER; note = 2'-O-methyladenosine-3'-phosphate
  modified_base 12: mod_base = OTHER; note = 2'-O-methylguanosine-3'-phosphate
  modified_base 13: mod_base = OTHER; note = 2'-O-methyladenosine-3'-phosphate
  modified_base 14: mod_base = OTHER; note = 2'-deoxy-2'-fluoroadenosine-3'-phosphate
  modified_base 15: mod_base = OTHER; note = 2'-O-methylcytidine-3'-phosphate
  modified_base 16: mod_base = OTHER; note = 2'-deoxy-2'-fluoroadenosine-3'-phosphate
  modified_base 17: mod_base = OTHER; note = 2'-O-methylcytidine-3'-phosphate
  modified_base 18: mod_base = OTHER; note = 2'-deoxy-2'-fluorouridine-3'-phosphate
  modified_base 19: mod_base = OTHER; note = 2'-O-methylguanosine-3'-phosphate
  modified_base 20: mod_base = OTHER; note = 2'-deoxy-2'-fluorouridine-3'-phosphate
  modified_base 21: mod_base = OTHER; note = 2'-O-methyluridine-3'-phosphorothioate
  modified_base 22: mod_base = OTHER; note = 2'-O-methyluridine-3'-phosphorothioate
  modified_base 23: mod_base = OTHER; note = 2'-O-methyluridine-3'-phosphate ((2S,4R)-1-[29-[[2-(acetylamino)-2-deoxy-beta-D-galactopyra nosyl]oxy]-14,14-bis[[3-[[3-[[5-[[2-(acetylamino)-2-deoxy-b eta-D-galactopyranosyl]oxy]-1-oxopentyl]amino]propyl]amino] -3-oxopropoxy]methyl]-1,12,19,25-tetraoxo-16-oxa-13,20,24-t riazanonacos-1-yl]-4-hydroxy-2-pyrrolidinyl)methyl ester
ttatagagcaagaacactgtttt

SEQ ID NO: 78 - RNA, 21 nt, synthetic construct
  source 1..21: mol_type = other RNA
  modified_base 1: mod_base = OTHER; note = 2'-deoxy-2'-fluoroadenosine-3'-phosphorothioate
  modified_base 2: mod_base = OTHER; note = 2'-O-methyladenosine-3'-phosphorothioate
  modified_base 3: mod_base = OTHER; note = 2'-deoxy-2'-fluorocytidine-3'-phosphate
  modified_base 4: mod_base = OTHER; note = 2'-O-methyladenosine-3'-phosphate
  modified_base 5: mod_base = OTHER; note = 2'-deoxy-2'-fluoroguanosine-3'-phosphate
  modified_base 6: mod_base = OTHER; note = 2'-O-methyluridine-3'-phosphate
  modified_base 7: mod_base = OTHER; note = 2'-deoxy-2'-fluoroguanosine-3'-phosphate
  modified_base 8: mod_base = OTHER; note = 2'-O-methyluridine-3'-phosphate
  modified_base 9: mod_base = OTHER; note = 2'-deoxy-2'-fluorouridine-3'-phosphate
  modified_base 10: mod_base = OTHER; note = 2'-deoxy-2'-fluorocytidine-3'-phosphate
  modified_base 11: mod_base = OTHER; note = 2'-deoxy-2'-fluorouridine-3'-phosphate
  modified_base 12: mod_base = OTHER; note = 2'-O-methyluridine-3'-phosphate
  modified_base 13: mod_base = OTHER; note = 2'-deoxy-2'-fluoroguanosine-3'-phosphate
  modified_base 14: mod_base = OTHER; note = 2'-O-methylcytidine-3'-phosphate
  modified_base 15: mod_base = OTHER; note = 2'-deoxy-2'-fluorouridine-3'-phosphate
  modified_base 16: mod_base = OTHER; note = 2'-O-methylcytidine-3'-phosphate
  modified_base 17: mod_base = OTHER; note = 2'-deoxy-2'-fluorouridine-3'-phosphate
  modified_base 18: mod_base = OTHER; note = 2'-O-methyladenosine-3'-phosphate
  modified_base 19: mod_base = OTHER; note = 2'-deoxy-2'-fluorouridine-3'-phosphorothioate
  modified_base 20: mod_base = OTHER; note = 2'-O-methyladenosine-3'-phosphorothioate
  modified_base 21: mod_base = OTHER; note = 2'-deoxy-2'-fluoroadenosine
aacagtgttcttgctctataa

SEQ ID NO: 79 - RNA, 23 nt, synthetic construct
  source 1..23: mol_type = other RNA
  modified_base 1: mod_base = OTHER; note = 2'-O-methyluridine-3'-phosphorothioate
  modified_base 2: mod_base = OTHER; note = 2'-deoxy-2'-fluorouridine-3'-phosphorothioate
  modified_base 3: mod_base = OTHER; note = 2'-O-methyladenosine-3'-phosphate
  modified_base 4: mod_base = OTHER; note = 2'-deoxy-2'-fluorouridine-3'-phosphate
  modified_base 5: mod_base = OTHER; note = 2'-O-methyladenosine-3'-phosphate
  modified_base 6: mod_base = OTHER; note = 2'-deoxy-2'-fluoroguanosine-3'-phosphate
  modified_base 7: mod_base = OTHER; note = 2'-O-methyladenosine-3'-phosphate
  modified_base 8: mod_base = OTHER; note = 2'-deoxy-2'-fluoroguanosine-3'-phosphate
  modified_base 9: mod_base = OTHER; note = 2'-O-methylcytidine-3'-phosphate
  modified_base 10: mod_base = OTHER; note = 2'-deoxy-2'-fluoroadenosine-3'-phosphate
  modified_base 11: mod_base = OTHER; note = 2'-O-methyladenosine-3'-phosphate
  modified_base 12: mod_base = OTHER; note = 2'-O-methylguanosine-3'-phosphate
  modified_base 13: mod_base = OTHER; note = 2'-O-methyladenosine-3'-phosphate
  modified_base 14: mod_base = OTHER; note = 2'-deoxy-2'-fluoroadenosine-3'-phosphate
  modified_base 15: mod_base = OTHER; note = 2'-O-methylcytidine-3'-phosphate
  modified_base 16: mod_base = OTHER; note = 2'-deoxy-2'-fluoroadenosine-3'-phosphate
  modified_base 17: mod_base = OTHER; note = 2'-O-methylcytidine-3'-phosphate
  modified_base 18: mod_base = OTHER; note = 2'-deoxy-2'-fluorouridine-3'-phosphate
  modified_base 19: mod_base = OTHER; note = 2'-O-methylguanosine-3'-phosphate
  modified_base 20: mod_base = OTHER; note = 2'-deoxy-2'-fluorouridine-3'-phosphate
  modified_base 21: mod_base = OTHER; note = 2'-O-methyluridine-3'-phosphate
  modified_base 22: mod_base = OTHER; note = 2'-O-methyluridine-3'-phosphate
  modified_base 23: mod_base = OTHER; note = 2'-O-methyluridine-3'-phosphate ((2S,4R)-1-[29-[[2-(acetylamino)-2-deoxy-beta-D-galactopyra nosyl]oxy]-14,14-bis[[3-[[3-[[5-[[2-(acetylamino)-2-deoxy-b eta-D-galactopyranosyl]oxy]-1-oxopentyl]amino]propyl]amino] -3-oxopropoxy]methyl]-1,12,19,25-tetraoxo-16-oxa-13,20,24-t riazanonacos-1-yl]-4-hydroxy-2-pyrrolidinyl)methyl ester
ttatagagcaagaacactgtttt

SEQ ID NO: 80 - RNA, 21 nt, synthetic construct
  source 1..21: mol_type = other RNA
  modified_base 1: mod_base = OTHER; note = 2'-deoxy-2'-fluoroadenosine-3'-phosphorothioate
  modified_base 2: mod_base = OTHER; note = 2'-O-methyladenosine-3'-phosphorothioate
  modified_base 3: mod_base = OTHER; note = 2'-deoxy-2'-fluorocytidine-3'-phosphate
  modified_base 4: mod_base = OTHER; note = 2'-O-methyladenosine-3'-phosphate
  modified_base 5: mod_base = OTHER; note = 2'-deoxy-2'-fluoroguanosine-3'-phosphate
  modified_base 6: mod_base = OTHER; note = 2'-O-methyluridine-3'-phosphate
  modified_base 7: mod_base = OTHER; note = 2'-deoxy-2'-fluoroguanosine-3'-phosphate
  modified_base 8: mod_base = OTHER; note = 2'-O-methyluridine-3'-phosphate
  modified_base 9: mod_base = OTHER; note = 2'-deoxy-2'-fluorouridine-3'-phosphate
  modified_base 10: mod_base = OTHER; note = 2'-deoxy-2'-fluorocytidine-3'-phosphate
  modified_base 11: mod_base = OTHER; note = 2'-deoxy-2'-fluorouridine-3'-phosphate
  modified_base 12: mod_base = OTHER; note = 2'-O-methyluridine-3'-phosphate
  modified_base 13: mod_base = OTHER; note = 2'-deoxy-2'-fluoroguanosine-3'-phosphate
  modified_base 14: mod_base = OTHER; note = 2'-O-methylcytidine-3'-phosphate
  modified_base 15: mod_base = OTHER; note = 2'-deoxy-2'-fluorouridine-3'-phosphate
  modified_base 16: mod_base = OTHER; note = 2'-O-methylcytidine-3'-phosphate
  modified_base 17: mod_base = OTHER; note = 2'-deoxy-2'-fluorouridine-3'-phosphate
  modified_base 18: mod_base = OTHER; note = 2'-O-methyladenosine-3'-phosphate
  modified_base 19: mod_base = OTHER; note = 2'-deoxy-2'-fluorouridine-3'-phosphorothioate
  modified_base 20: mod_base = OTHER; note = 2'-O-methyladenosine-3'-phosphorothioate
  modified_base 21: mod_base = OTHER; note = 2'-deoxy-2'-fluoroadenosine
aacagtgttcttgctctataa

SEQ ID NO: 81 - RNA, 23 nt, synthetic construct
  source 1..23: mol_type = other RNA
  modified_base 1: mod_base = OTHER; note = 2'-O-methyluridine-3'-phosphorothioate
  modified_base 2: mod_base = OTHER; note = 2'-deoxy-2'-fluorouridine-3'-phosphorothioate
  modified_base 3: mod_base = OTHER; note = 2'-O-methyladenosine-3'-phosphate
  modified_base 4: mod_base = OTHER; note = 2'-deoxy-2'-fluorouridine-3'-phosphate
  modified_base 5: mod_base = OTHER; note = 2'-O-methyladenosine-3'-phosphate
  modified_base 6: mod_base = OTHER; note = 2'-deoxy-2'-fluoroguanosine-3'-phosphate
  modified_base 7: mod_base = OTHER; note = 2'-O-methyladenosine-3'-phosphate
  modified_base 8: mod_base = OTHER; note = 2'-deoxy-2'-fluoroguanosine-3'-phosphate
  modified_base 9: mod_base = OTHER; note = 2'-O-methylcytidine-3'-phosphate
  modified_base 10: mod_base = OTHER; note = 2'-deoxy-2'-fluoroadenosine-3'-phosphate
  modified_base 11: mod_base = OTHER; note = 2'-O-methyladenosine-3'-phosphate
  modified_base 12: mod_base = OTHER; note = 2'-O-methylguanosine-3'-phosphate
  modified_base 13: mod_base = OTHER; note = 2'-O-methyladenosine-3'-phosphate
  modified_base 14: mod_base = OTHER; note = 2'-deoxy-2'-fluoroadenosine-3'-phosphate
  modified_base 15: mod_base = OTHER; note = 2'-O-methylcytidine-3'-phosphate
  modified_base 16: mod_base = OTHER; note = 2'-deoxy-2'-fluoroadenosine-3'-phosphate
  modified_base 17: mod_base = OTHER; note = 2'-O-methylcytidine-3'-phosphate
  modified_base 18: mod_base = OTHER; note = 2'-deoxy-2'-fluorouridine-3'-phosphate
  modified_base 19: mod_base = OTHER; note = 2'-O-methylguanosine-3'-phosphate
  modified_base 20: mod_base = OTHER; note = 2'-deoxy-2'-fluorouridine-3'-phosphate
  modified_base 21: mod_base = OTHER; note = 2'-O-methyluridine-3'-phosphorothioate
  modified_base 22: mod_base = OTHER; note = 2'-O-methyluridine-3'-phosphorothioate
  modified_base 23: mod_base = OTHER; note = 2'-O-methyluridine
ttatagagcaagaacactgtttt

SEQ ID NO: 82 - RNA, 21 nt, synthetic construct
  source 1..21: mol_type = other RNA
  modified_base 1: mod_base = OTHER; note = 2'-deoxy-2'-fluoroadenosine-3'-phosphorothioate
  modified_base 2: mod_base = OTHER; note = 2'-O-methyladenosine-3'-phosphorothioate
  modified_base 3: mod_base = OTHER; note = 2'-deoxy-2'-fluorocytidine-3'-phosphate
  modified_base 4: mod_base = OTHER; note = 2'-O-methyladenosine-3'-phosphate
  modified_base 5: mod_base = OTHER; note = 2'-deoxy-2'-fluoroguanosine-3'-phosphate
  modified_base 6: mod_base = OTHER; note = 2'-O-methyluridine-3'-phosphate
  modified_base 7: mod_base = OTHER; note = 2'-deoxy-2'-fluoroguanosine-3'-phosphate
  modified_base 8: mod_base = OTHER; note = 2'-O-methyluridine-3'-phosphate
  modified_base 9: mod_base = OTHER; note = 2'-deoxy-2'-fluorouridine-3'-phosphate
  modified_base 10: mod_base = OTHER; note = 2'-deoxy-2'-fluorocytidine-3'-phosphate
  modified_base 11: mod_base = OTHER; note = 2'-deoxy-2'-fluorouridine-3'-phosphate
  modified_base 12: mod_base = OTHER; note = 2'-O-methyluridine-3'-phosphate
  modified_base 13: mod_base = OTHER; note = 2'-deoxy-2'-fluoroguanosine-3'-phosphate
  modified_base 14: mod_base = OTHER; note = 2'-O-methylcytidine-3'-phosphate
  modified_base 15: mod_base = OTHER; note = 2'-deoxy-2'-fluorouridine-3'-phosphate
  modified_base 16: mod_base = OTHER; note = 2'-O-methylcytidine-3'-phosphate
  modified_base 17: mod_base = OTHER; note = 2'-deoxy-2'-fluorouridine-3'-phosphate
  modified_base 18: mod_base = OTHER; note = 2'-O-methyladenosine-3'-phosphate
  modified_base 19: mod_base = OTHER; note = 2'-deoxy-2'-fluorouridine-3'-phosphorothioate
  modified_base 20: mod_base = OTHER; note = 2'-O-methyladenosine-3'-phosphorothioate
  modified_base 21: mod_base = OTHER; note = 2'-deoxy-2'-fluoroadenosine
aacagtgttcttgctctataa

SEQ ID NO: 83 - DNA, 23 bp, synthetic construct
  source 1..23: mol_type = other DNA
  modified_base 1: mod_base = OTHER; note = 2'-O-methyluridine-3'-phosphorothioate
  modified_base 2: mod_base = OTHER; note = 2'-deoxy-2'-fluorouridine-3'-phosphorothioate
  modified_base 3: mod_base = OTHER; note = 2'-O-methyladenosine-3'-phosphate
  modified_base 4: mod_base = OTHER; note = 2'-deoxy-2'-fluorouridine-3'-phosphate
  modified_base 5: mod_base = OTHER; note = 2'-O-methyladenosine-3'-phosphate
  modified_base 6: mod_base = OTHER; note = 2'-deoxy-2'-fluoroguanosine-3'-phosphate
  modified_base 7: mod_base = OTHER; note = 2'-O-methyladenosine-3'-phosphate
  modified_base 8: mod_base = OTHER; note = 2'-deoxy-2'-fluoroguanosine-3'-phosphate
  modified_base 9: mod_base = OTHER; note = 2'-O-methylcytidine-3'-phosphate
  modified_base 10: mod_base = OTHER; note = 2'-deoxy-2'-fluoroadenosine-3'-phosphate
  modified_base 11: mod_base = OTHER; note = 2'-O-methyladenosine-3'-phosphate
  modified_base 12: mod_base = OTHER; note = 2'-O-methylguanosine-3'-phosphate
  modified_base 13: mod_base = OTHER; note = 2'-O-methyladenosine-3'-phosphate
  modified_base 14: mod_base = OTHER; note = 2'-deoxy-2'-fluoroadenosine-3'-phosphate
  modified_base 15: mod_base = OTHER; note = 2'-O-methylcytidine-3'-phosphate
  modified_base 16: mod_base = OTHER; note = 2'-deoxy-2'-fluoroadenosine-3'-phosphate
  modified_base 17: mod_base = OTHER; note = 2'-O-methylcytidine-3'-phosphate
  modified_base 18: mod_base = OTHER; note = 2'-deoxy-2'-fluorouridine-3'-phosphate
  modified_base 19: mod_base = OTHER; note = 2'-O-methylguanosine-3'-phosphate
  modified_base 20: mod_base = OTHER; note = 2'-deoxy-2'-fluorouridine-3'-phosphate
  modified_base 21: mod_base = OTHER; note = 2'-O-methyluridine-3'-phosphate
  modified_base 23: mod_base = OTHER; note = 2'-deoxythymidine-3'-phosphate ((2S,4R)-1-[29-[[2-(acetylamino)-2-deoxy-beta-D-galactopyra nosyl]oxy]-14,14-bis[[3-[[3-[[5-[[2-(acetylamino)-2-deoxy-b eta-D-galactopyranosyl]oxy]-1-oxopentyl]amino]propyl]amino] -3-oxopropoxy]methyl]-1,12,19,25-tetraoxo-16-oxa-13,20,24-t riazanonacos-1-yl]-4-hydroxy-2-pyrrolidinyl)methyl ester
  misc_feature 1..21: note = RNA
  misc_feature 22..23: note = DNA
ttatagagcaagaacactgtttt

SEQ ID NO: 84 - RNA, 21 nt, synthetic construct
  source 1..21: mol_type = other RNA
  modified_base 1: mod_base = OTHER; note = 2'-deoxy-2'-fluoroadenosine-3'-phosphorothioate
  modified_base 2: mod_base = OTHER; note = 2'-O-methyladenosine-3'-phosphorothioate
  modified_base 3: mod_base = OTHER; note = 2'-deoxy-2'-fluorocytidine-3'-phosphate
  modified_base 4: mod_base = OTHER; note = 2'-O-methyladenosine-3'-phosphate
  modified_base 5: mod_base = OTHER; note = 2'-deoxy-2'-fluoroguanosine-3'-phosphate
  modified_base 6: mod_base = OTHER; note = 2'-O-methyluridine-3'-phosphate
  modified_base 7: mod_base = OTHER; note = 2'-deoxy-2'-fluoroguanosine-3'-phosphate
  modified_base 8: mod_base = OTHER; note = 2'-O-methyluridine-3'-phosphate
  modified_base 9: mod_base = OTHER; note = 2'-deoxy-2'-fluorouridine-3'-phosphate
  modified_base 10: mod_base = OTHER; note = 2'-deoxy-2'-fluorocytidine-3'-phosphate
  modified_base 11: mod_base = OTHER; note = 2'-deoxy-2'-fluorouridine-3'-phosphate
  modified_base 12: mod_base = OTHER; note = 2'-O-methyluridine-3'-phosphate
  modified_base 13: mod_base = OTHER; note = 2'-deoxy-2'-fluoroguanosine-3'-phosphate
  modified_base 14: mod_base = OTHER; note = 2'-O-methylcytidine-3'-phosphate
  modified_base 15: mod_base = OTHER; note = 2'-deoxy-2'-fluorouridine-3'-phosphate
  modified_base 16: mod_base = OTHER; note = 2'-O-methylcytidine-3'-phosphate
  modified_base 17: mod_base = OTHER; note = 2'-deoxy-2'-fluorouridine-3'-phosphate
  modified_base 18: mod_base = OTHER; note = 2'-O-methyladenosine-3'-phosphate
  modified_base 19: mod_base = OTHER; note = 2'-deoxy-2'-fluorouridine-3'-phosphorothioate
  modified_base 20: mod_base = OTHER; note = 2'-O-methyladenosine-3'-phosphorothioate
  modified_base 21: mod_base = OTHER; note = 2'-deoxy-2'-fluoroadenosine
aacagtgttcttgctctataa

SEQ ID NO: 85 - DNA, 23 bp, synthetic construct
  source 1..23: mol_type = other DNA
  modified_base 1: mod_base = OTHER; note = 2'-O-methyluridine-3'-phosphorothioate
  modified_base 2: mod_base = OTHER; note = 2'-deoxy-2'-fluorouridine-3'-phosphorothioate
  modified_base 3: mod_base = OTHER; note = 2'-O-methyladenosine-3'-phosphate
  modified_base 4: mod_base = OTHER; note = 2'-deoxy-2'-fluorouridine-3'-phosphate
  modified_base 5: mod_base = OTHER; note = 2'-O-methyladenosine-3'-phosphate
  modified_base 6: mod_base = OTHER; note = 2'-deoxy-2'-fluoroguanosine-3'-phosphate
  modified_base 7: mod_base = OTHER; note = 2'-O-methyladenosine-3'-phosphate
  modified_base 8: mod_base = OTHER; note = 2'-deoxy-2'-fluoroguanosine-3'-phosphate
  modified_base 9: mod_base = OTHER; note = 2'-O-methylcytidine-3'-phosphate
  modified_base 10: mod_base = OTHER; note = 2'-deoxy-2'-fluoroadenosine-3'-phosphate
  modified_base 11: mod_base = OTHER; note = 2'-O-methyladenosine-3'-phosphate
  modified_base 12: mod_base = OTHER; note = 2'-O-methylguanosine-3'-phosphate
  modified_base 13: mod_base = OTHER; note = 2'-O-methyladenosine-3'-phosphate
  modified_base 14: mod_base = OTHER; note = 2'-deoxy-2'-fluoroadenosine-3'-phosphate
  modified_base 15: mod_base = OTHER; note = 2'-O-methylcytidine-3'-phosphate
  modified_base 16: mod_base = OTHER; note = 2'-deoxy-2'-fluoroadenosine-3'-phosphate
  modified_base 17: mod_base = OTHER; note = 2'-O-methylcytidine-3'-phosphate
  modified_base 18: mod_base = OTHER; note = 2'-deoxy-2'-fluorouridine-3'-phosphate
  modified_base 19: mod_base = OTHER; note = 2'-O-methylguanosine-3'-phosphate
  modified_base 20: mod_base = OTHER; note = 2'-deoxy-2'-fluorouridine-3'-phosphate
  modified_base 21: mod_base = OTHER; note = 2'-O-methyluridine-3'-phosphorothioate
  modified_base 22: mod_base = OTHER; note = 2'-deoxythymidine-3'-phosphorothioate
  modified_base 23: mod_base = OTHER; note = 2'-deoxythymidine-3'-phosphate ((2S,4R)-1-[29-[[2-(acetylamino)-2-deoxy-beta-D-galactopyra nosyl]oxy]-14,14-bis[[3-[[3-[[5-[[2-(acetylamino)-2-deoxy-b eta-D-galactopyranosyl]oxy]-1-oxopentyl]amino]propyl]amino] -3-oxopropoxy]methyl]-1,12,19,25-tetraoxo-16-oxa-13,20,24-t riazanonacos-1-yl]-4-hydroxy-2-pyrrolidinyl)methyl ester
  misc_feature 1..21: note = RNA
  misc_feature 22..23: note = DNA
ttatagagcaagaacactgtttt

SEQ ID NO: 86 - RNA, 21 nt, synthetic construct
  source 1..21: mol_type = other RNA
  modified_base 1: mod_base = OTHER; note = 2'-deoxy-2'-fluoroadenosine-3'-phosphorothioate
  modified_base 2: mod_base = OTHER; note = 2'-O-methyladenosine-3'-phosphorothioate
  modified_base 3: mod_base = OTHER; note = 2'-deoxy-2'-fluorocytidine-3'-phosphate
  modified_base 4: mod_base = OTHER; note = 2'-O-methyladenosine-3'-phosphate
  modified_base 5: mod_base = OTHER; note = 2'-deoxy-2'-fluoroguanosine-3'-phosphate
  modified_base 6: mod_base = OTHER; note = 2'-O-methyluridine-3'-phosphate
  modified_base 7: mod_base = OTHER; note = 2'-deoxy-2'-fluoroguanosine-3'-phosphate
  modified_base 8: mod_base = OTHER; note = 2'-O-methyluridine-3'-phosphate
  modified_base 9: mod_base = OTHER; note = 2'-deoxy-2'-fluorouridine-3'-phosphate
  modified_base 10: mod_base = OTHER; note = 2'-deoxy-2'-fluorocytidine-3'-phosphate
  modified_base 11: mod_base = OTHER; note = 2'-deoxy-2'-fluorouridine-3'-phosphate
  modified_base 12: mod_base = OTHER; note = 2'-O-methyluridine-3'-phosphate
  modified_base 13: mod_base = OTHER; note = 2'-deoxy-2'-fluoroguanosine-3'-phosphate
  modified_base 14: mod_base = OTHER; note = 2'-O-methylcytidine-3'-phosphate
  modified_base 15: mod_base = OTHER; note = 2'-deoxy-2'-fluorouridine-3'-phosphate
  modified_base 16: mod_base = OTHER; note = 2'-O-methylcytidine-3'-phosphate
  modified_base 17: mod_base = OTHER; note = 2'-deoxy-2'-fluorouridine-3'-phosphate
  modified_base 18: mod_base = OTHER; note = 2'-O-methyladenosine-3'-phosphate
  modified_base 19: mod_base = OTHER; note = 2'-deoxy-2'-fluorouridine-3'-phosphorothioate
  modified_base 20: mod_base = OTHER; note = 2'-O-methyladenosine-3'-phosphorothioate
  modified_base 21: mod_base = OTHER; note = 2'-deoxy-2'-fluoroadenosine
aacagtgttcttgctctataa

SEQ ID NO: 87 - DNA, 25 bp, synthetic construct
  source 1..25: mol_type = other DNA
  modified_base 1: mod_base = OTHER; note = 2'-O-methyluridine-3'-phosphorothioate
  modified_base 2: mod_base = OTHER; note = 2'-deoxy-2'-fluorouridine-3'-phosphorothioate
  modified_base 3: mod_base = OTHER; note = 2'-O-methyladenosine-3'-phosphate
  modified_base 4: mod_base = OTHER; note = 2'-deoxy-2'-fluorouridine-3'-phosphate
  modified_base 5: mod_base = OTHER; note = 2'-O-methyladenosine-3'-phosphate
  modified_base 6: mod_base = OTHER; note = 2'-deoxy-2'-fluoroguanosine-3'-phosphate
  modified_base 7: mod_base = OTHER; note = 2'-O-methyladenosine-3'-phosphate
  modified_base 8: mod_base = OTHER; note = 2'-deoxy-2'-fluoroguanosine-3'-phosphate
  modified_base 9: mod_base = OTHER; note = 2'-O-methylcytidine-3'-phosphate
  modified_base 10: mod_base = OTHER; note = 2'-deoxy-2'-fluoroadenosine-3'-phosphate
  modified_base 11: mod_base = OTHER; note = 2'-O-methyladenosine-3'-phosphate
  modified_base 12: mod_base = OTHER; note = 2'-O-methylguanosine-3'-phosphate
  modified_base 13: mod_base = OTHER; note = 2'-O-methyladenosine-3'-phosphate
  modified_base 14: mod_base = OTHER; note = 2'-deoxy-2'-fluoroadenosine-3'-phosphate
  modified_base 15: mod_base = OTHER; note = 2'-O-methylcytidine-3'-phosphate
  modified_base 16: mod_base = OTHER; note = 2'-deoxy-2'-fluoroadenosine-3'-phosphate
  modified_base 17: mod_base = OTHER; note = 2'-O-methylcytidine-3'-phosphate
  modified_base 18: mod_base = OTHER; note = 2'-deoxy-2'-fluorouridine-3'-phosphate
  modified_base 19: mod_base = OTHER; note = 2'-O-methylguanosine-3'-phosphate
  modified_base 20: mod_base = OTHER; note = 2'-deoxy-2'-fluorouridine-3'-phosphate
  modified_base 21: mod_base = OTHER; note = 2'-O-methyluridine-3'-phosphorothioate
  modified_base 22: mod_base = OTHER; note = 2'-O-methyluridine-3'-phosphorothioate
  modified_base 23: mod_base = OTHER; note = 2'-O-methyluridine-3'-phosphate
  modified_base 25: mod_base = OTHER; note = 2'-deoxythymidine-3'-phosphate ((2S,4R)-1-[29-[[2-(acetylamino)-2-deoxy-beta-D-galactopyra nosyl]oxy]-14,14-bis[[3-[[3-[[5-[[2-(acetylamino)-2-deoxy-b eta-D-galactopyranosyl]oxy]-1-oxopentyl]amino]propyl]amino] -3-oxopropoxy]methyl]-1,12,19,25-tetraoxo-16-oxa-13,20,24-t riazanonacos-1-yl]-4-hydroxy-2-pyrrolidinyl)methyl ester
  misc_feature 1..23: note = RNA
  misc_feature 24..25: note = DNA
ttatagagcaagaacactgtttttt

SEQ ID NO: 88 - RNA, 21 nt, synthetic construct
  source 1..21: mol_type = other RNA
  modified_base 1: mod_base = OTHER; note = 2'-deoxy-2'-fluoroadenosine-3'-phosphorothioate
  modified_base 2: mod_base = OTHER; note = 2'-O-methyladenosine-3'-phosphorothioate
  modified_base 3: mod_base = OTHER; note = 2'-deoxy-2'-fluorocytidine-3'-phosphate
  modified_base 4: mod_base = OTHER; note = 2'-O-methyladenosine-3'-phosphate
  modified_base 5: mod_base = OTHER; note = 2'-deoxy-2'-fluoroguanosine-3'-phosphate
  modified_base 6: mod_base = OTHER; note = 2'-O-methyluridine-3'-phosphate
  modified_base 7: mod_base = OTHER; note = 2'-deoxy-2'-fluoroguanosine-3'-phosphate
  modified_base 8: mod_base = OTHER; note = 2'-O-methyluridine-3'-phosphate
  modified_base 9: mod_base = OTHER; note = 2'-deoxy-2'-fluorouridine-3'-phosphate
  modified_base 10: mod_base = OTHER; note = 2'-deoxy-2'-fluorocytidine-3'-phosphate
  modified_base 11: mod_base = OTHER; note = 2'-deoxy-2'-fluorouridine-3'-phosphate
  modified_base 12: mod_base = OTHER; note = 2'-O-methyluridine-3'-phosphate
  modified_base 13: mod_base = OTHER; note = 2'-deoxy-2'-fluoroguanosine-3'-phosphate
  modified_base 14: mod_base = OTHER; note = 2'-O-methylcytidine-3'-phosphate
  modified_base 15: mod_base = OTHER; note = 2'-deoxy-2'-fluorouridine-3'-phosphate
  modified_base 16: mod_base = OTHER; note = 2'-O-methylcytidine-3'-phosphate
  modified_base 17: mod_base = OTHER; note = 2'-deoxy-2'-fluorouridine-3'-phosphate
  modified_base 18: mod_base = OTHER; note = 2'-O-methyladenosine-3'-phosphate
  modified_base 19: mod_base = OTHER; note = 2'-deoxy-2'-fluorouridine-3'-phosphorothioate
  modified_base 20: mod_base = OTHER; note = 2'-O-methyladenosine-3'-phosphorothioate
  modified_base 21: mod_base = OTHER; note = 2'-deoxy-2'-fluoroadenosine
aacagtgttcttgctctataa

SEQ ID NO: 89 - DNA, 25 bp, synthetic construct
  source 1..25: mol_type = other DNA
  modified_base 1: mod_base = OTHER; note = 2'-O-methyluridine-3'-phosphorothioate
  modified_base 2: mod_base = OTHER; note = 2'-deoxy-2'-fluorouridine-3'-phosphorothioate
  modified_base 3: mod_base = OTHER; note = 2'-O-methyladenosine-3'-phosphate
  modified_base 4: mod_base = OTHER; note = 2'-deoxy-2'-fluorouridine-3'-phosphate
  modified_base 5: mod_base = OTHER; note = 2'-O-methyladenosine-3'-phosphate
  modified_base 6: mod_base = OTHER; note = 2'-deoxy-2'-fluoroguanosine-3'-phosphate
  modified_base 7: mod_base = OTHER; note = 2'-O-methyladenosine-3'-phosphate
  modified_base 8: mod_base = OTHER; note = 2'-deoxy-2'-fluoroguanosine-3'-phosphate
  modified_base 9: mod_base = OTHER; note = 2'-O-methylcytidine-3'-phosphate
  modified_base 10: mod_base = OTHER; note = 2'-deoxy-2'-fluoroadenosine-3'-phosphate
  modified_base 11: mod_base = OTHER; note = 2'-O-methyladenosine-3'-phosphate
  modified_base 12: mod_base = OTHER; note = 2'-O-methylguanosine-3'-phosphate
  modified_base 13: mod_base = OTHER; note = 2'-O-methyladenosine-3'-phosphate
  modified_base 14: mod_base = OTHER; note = 2'-deoxy-2'-fluoroadenosine-3'-phosphate
  modified_base 15: mod_base = OTHER; note = 2'-O-methylcytidine-3'-phosphate
  modified_base 16: mod_base = OTHER; note = 2'-deoxy-2'-fluoroadenosine-3'-phosphate
  modified_base 17: mod_base = OTHER; note = 2'-O-methylcytidine-3'-phosphate
  modified_base 18: mod_base = OTHER; note = 2'-deoxy-2'-fluorouridine-3'-phosphate
  modified_base 19: mod_base = OTHER; note = 2'-O-methylguanosine-3'-phosphate
  modified_base 20: mod_base = OTHER; note = 2'-deoxy-2'-fluorouridine-3'-phosphate
  modified_base 21: mod_base = OTHER; note = 2'-O-methyluridine-3'-phosphate
  modified_base 22: mod_base = OTHER; note = 2'-O-methyluridine-3'-phosphate
  modified_base 23: mod_base = OTHER; note = 2'-O-methyluridine-3'-phosphorothioate
  modified_base 24: mod_base = OTHER; note = 2'-deoxythymidine-3'-phosphorothioate
  modified_base 25: mod_base = OTHER; note = 2'-deoxythymidine-3'-phosphate ((2S,4R)-1-[29-[[2-(acetylamino)-2-deoxy-beta-D-galactopyra nosyl]oxy]-14,14-bis[[3-[[3-[[5-[[2-(acetylamino)-2-deoxy-b eta-D-galactopyranosyl]oxy]-1-oxopentyl]amino]propyl]amino] -3-oxopropoxy]methyl]-1,12,19,25-tetraoxo-16-oxa-13,20,24-t riazanonacos-1-yl]-4-hydroxy-2-pyrrolidinyl)methyl ester
  misc_feature 1..23: note = RNA
  misc_feature 24..25: note = DNA
ttatagagcaagaacactgtttttt

SEQ ID NO: 90 - RNA, 22 nt, synthetic construct
  source 1..22: mol_type = other RNA
  modified_base 1: mod_base = OTHER; note = 2'-O-methyladenosine-3'-phosphorothioate
  modified_base 2: mod_base = OTHER; note = 2'-deoxy-2'-fluoroadenosine-3'-phosphorothioate
  modified_base 3: mod_base = OTHER; note = 2'-O-methyladenosine-3'-phosphate
  modified_base 4: mod_base = OTHER; note = 2'-deoxy-2'-fluorocytidine-3'-phosphate
  modified_base 5: mod_base = OTHER; note = 2'-O-methyladenosine-3'-phosphate
  modified_base 6: mod_base = OTHER; note = 2'-deoxy-2'-fluoroguanosine-3'-phosphate
  modified_base 7: mod_base = OTHER; note = 2'-O-methyluridine-3'-phosphate
  modified_base 8: mod_base = OTHER; note = 2'-deoxy-2'-fluoroguanosine-3'-phosphate
  modified_base 9: mod_base = OTHER; note = 2'-O-methyluridine-3'-phosphate
  modified_base 10: mod_base = OTHER; note = 2'-deoxy-2'-fluorouridine-3'-phosphate
  modified_base 11: mod_base = OTHER; note = 2'-deoxy-2'-fluorocytidine-3'-phosphate
  modified_base 12: mod_base = OTHER; note = 2'-deoxy-2'-fluorouridine-3'-phosphate
  modified_base 13: mod_base = OTHER; note = 2'-O-methyluridine-3'-phosphate
  modified_base 14: mod_base = OTHER; note = 2'-deoxy-2'-fluoroguanosine-3'-phosphate
  modified_base 15: mod_base = OTHER; note = 2'-O-methylcytidine-3'-phosphate
  modified_base 16: mod_base = OTHER; note = 2'-deoxy-2'-fluorouridine-3'-phosphate
  modified_base 17: mod_base = OTHER; note = 2'-O-methylcytidine-3'-phosphate
  modified_base 18: mod_base = OTHER; note = 2'-deoxy-2'-fluorouridine-3'-phosphate
  modified_base 19: mod_base = OTHER; note = 2'-O-methyladenosine-3'-phosphate
  modified_base 20: mod_base = OTHER; note = 2'-deoxy-2'-fluorouridine-3'-phosphorothioate
  modified_base 21: mod_base = OTHER; note = 2'-O-methyladenosine-3'-phosphorothioate
  modified_base 22: mod_base = OTHER; note = 2'-deoxy-2'-fluoroadenosine
aaacagtgttcttgctctataa

SEQ ID NO: 91 - RNA, 22 nt, synthetic construct
  source 1..22: mol_type = other RNA
  modified_base 1: mod_base = OTHER; note = 2'-O-methyluridine-3'-phosphorothioate
  modified_base 2: mod_base = OTHER; note = 2'-deoxy-2'-fluorouridine-3'-phosphorothioate
  modified_base 3: mod_base = OTHER; note = 2'-O-methyladenosine-3'-phosphate
  modified_base 4: mod_base = OTHER; note = 2'-deoxy-2'-fluorouridine-3'-phosphate
  modified_base 5: mod_base = OTHER; note = 2'-O-methyladenosine-3'-phosphate
  modified_base 6: mod_base = OTHER; note = 2'-deoxy-2'-fluoroguanosine-3'-phosphate
  modified_base 7: mod_base = OTHER; note = 2'-O-methyladenosine-3'-phosphate
  modified_base 8: mod_base = OTHER; note = 2'-deoxy-2'-fluoroguanosine-3'-phosphate
  modified_base 9: mod_base = OTHER; note = 2'-O-methylcytidine-3'-phosphate
  modified_base 10: mod_base = OTHER; note = 2'-deoxy-2'-fluoroadenosine-3'-phosphate
  modified_base 11: mod_base = OTHER; note = 2'-O-methyladenosine-3'-phosphate
  modified_base 12: mod_base = OTHER; note = 2'-O-methylguanosine-3'-phosphate
  modified_base 13: mod_base = OTHER; note = 2'-O-methyladenosine-3'-phosphate
  modified_base 14: mod_base = OTHER; note = 2'-deoxy-2'-fluoroadenosine-3'-phosphate
  modified_base 15: mod_base = OTHER; note = 2'-O-methylcytidine-3'-phosphate
  modified_base 16: mod_base = OTHER; note = 2'-deoxy-2'-fluoroadenosine-3'-phosphate
  modified_base 17: mod_base = OTHER; note = 2'-O-methylcytidine-3'-phosphate
  modified_base 18: mod_base = OTHER; note = 2'-deoxy-2'-fluorouridine-3'-phosphate
  modified_base 19: mod_base = OTHER; note = 2'-O-methylguanosine-3'-phosphate
  modified_base 20: mod_base = OTHER; note = 2'-deoxy-2'-fluorouridine-3'-phosphorothioate
  modified_base 21: mod_base = OTHER; note = 2'-O-methyluridine-3'-phosphorothioate
  modified_base 22: mod_base = OTHER; note = 2'-O-methyluridine-3'-phosphate ((2S,4R)-1-[29-[[2-(acetylamino)-2-deoxy-beta-D-galactopyra nosyl]oxy]-14,14-bis[[3-[[3-[[5-[[2-(acetylamino)-2-deoxy-b eta-D-galactopyranosyl]oxy]-1-oxopentyl]amino]propyl]amino] -3-oxopropoxy]methyl]-1,12,19,25-tetraoxo-16-oxa-13,20,24-t riazanonacos-1-yl]-4-hydroxy-2-pyrrolidinyl)methyl ester
ttatagagcaagaacactgttt

SEQ ID NO: 92 - RNA, 22 nt, synthetic construct
  source 1..22: mol_type = other RNA
  modified_base 1: mod_base = OTHER; note = 2'-O-methyladenosine-3'-phosphorothioate
  modified_base 2: mod_base = OTHER; note = 2'-deoxy-2'-fluoroadenosine-3'-phosphorothioate
  modified_base 3: mod_base = OTHER; note = 2'-O-methyladenosine-3'-phosphate
  modified_base 4: mod_base = OTHER; note = 2'-deoxy-2'-fluorocytidine-3'-phosphate
  modified_base 5: mod_base = OTHER; note = 2'-O-methyladenosine-3'-phosphate
  modified_base 6: mod_base = OTHER; note = 2'-deoxy-2'-fluoroguanosine-3'-phosphate
  modified_base 7: mod_base = OTHER; note = 2'-O-methyluridine-3'-phosphate
  modified_base 8: mod_base = OTHER; note = 2'-deoxy-2'-fluoroguanosine-3'-phosphate
  modified_base 9: mod_base = OTHER; note = 2'-O-methyluridine-3'-phosphate
  modified_base 10: mod_base = OTHER; note = 2'-deoxy-2'-fluorouridine-3'-phosphate
  modified_base 11: mod_base = OTHER; note = 2'-deoxy-2'-fluorocytidine-3'-phosphate
  modified_base 12: mod_base = OTHER; note = 2'-deoxy-2'-fluorouridine-3'-phosphate
  modified_base 13: mod_base = OTHER; note = 2'-O-methyluridine-3'-phosphate
  modified_base 14: mod_base = OTHER; note = 2'-deoxy-2'-fluoroguanosine-3'-phosphate
  modified_base 15: mod_base = OTHER; note = 2'-O-methylcytidine-3'-phosphate
  modified_base 16: mod_base = OTHER; note = 2'-deoxy-2'-fluorouridine-3'-phosphate
  modified_base 17: mod_base = OTHER; note = 2'-O-methylcytidine-3'-phosphate
  modified_base 18: mod_base = OTHER; note = 2'-deoxy-2'-fluorouridine-3'-phosphate
  modified_base 19: mod_base = OTHER; note = 2'-O-methyladenosine-3'-phosphate
  modified_base 20: mod_base = OTHER; note = 2'-deoxy-2'-fluorouridine-3'-phosphorothioate
  modified_base 21: mod_base = OTHER; note = 2'-O-methyladenosine-3'-phosphorothioate
  modified_base 22: mod_base = OTHER; note = 2'-deoxy-2'-fluoroadenosine
aaacagtgttcttgctctataa

SEQ ID NO: 93 - RNA, 23 nt, synthetic construct
  source 1..23: mol_type = other RNA
  modified_base 1: mod_base = OTHER; note = 2'-O-methyluridine-3'-phosphorothioate
  modified_base 2: mod_base = OTHER; note = 2'-deoxy-2'-fluorouridine-3'-phosphorothioate
  modified_base 3: mod_base = OTHER; note = 2'-O-methyladenosine-3'-phosphate
  modified_base 4: mod_base = OTHER; note = 2'-deoxy-2'-fluorouridine-3'-phosphate
  modified_base 5: mod_base = OTHER; note = 2'-O-methyladenosine-3'-phosphate
  modified_base 6: mod_base = OTHER; note = 2'-deoxy-2'-fluoroguanosine-3'-phosphate
  modified_base 7: mod_base = OTHER; note = 2'-O-methyladenosine-3'-phosphate
  modified_base 8: mod_base = OTHER; note = 2'-deoxy-2'-fluoroguanosine-3'-phosphate
  modified_base 9: mod_base = OTHER; note = 2'-O-methylcytidine-3'-phosphate
  modified_base 10: mod_base = OTHER; note = 2'-deoxy-2'-fluoroadenosine-3'-phosphate
  modified_base 11: mod_base = OTHER; note = 2'-O-methyladenosine-3'-phosphate
  modified_base 12: mod_base = OTHER; note = 2'-O-methylguanosine-3'-phosphate
  modified_base 13: mod_base = OTHER; note = 2'-O-methyladenosine-3'-phosphate
  modified_base 14: mod_base = OTHER; note = 2'-deoxy-2'-fluoroadenosine-3'-phosphate
  modified_base 15: mod_base = OTHER; note = 2'-O-methylcytidine-3'-phosphate
  modified_base 16: mod_base = OTHER; note = 2'-deoxy-2'-fluoroadenosine-3'-phosphate
  modified_base 17: mod_base = OTHER; note = 2'-O-methylcytidine-3'-phosphate
  modified_base 18: mod_base = OTHER; note = 2'-deoxy-2'-fluorouridine-3'-phosphate
  modified_base 19: mod_base = OTHER; note = 2'-O-methylguanosine-3'-phosphate
  modified_base 20: mod_base = OTHER; note = 2'-deoxy-2'-fluorouridine-3'-phosphate
  modified_base 21: mod_base = OTHER; note = 2'-O-methyluridine-3'-phosphorothioate
  modified_base 22: mod_base = OTHER; note = 2'-O-methyluridine-3'-phosphorothioate
  modified_base 23: mod_base = OTHER; note = 2'-O-methyluridine-3'-phosphate ((2S,4R)-1-[29-[[2-(acetylamino)-2-deoxy-beta-D-galactopyra nosyl]oxy]-14,14-bis[[3-[[3-[[5-[[2-(acetylamino)-2-deoxy-b eta-D-galactopyranosyl]oxy]-1-oxopentyl]amino]propyl]amino] -3-oxopropoxy]methyl]-1,12,19,25-tetraoxo-16-oxa-13,20,24-t riazanonacos-1-yl]-4-hydroxy-2-pyrrolidinyl)methyl ester
ttatagagcaagaacactgtttt

SEQ ID NO: 94 - RNA, 21 nt, synthetic construct
  source 1..21: mol_type = other RNA
  modified_base 1: mod_base = OTHER; note = 2'-deoxy-2'-fluoroadenosine-3'-phosphorothioate
  modified_base 2: mod_base = OTHER; note = 2'-O-methyladenosine-3'-phosphorothioate
  modified_base 3: mod_base = OTHER; note = 2'-deoxy-2'-fluorocytidine-3'-phosphate
  modified_base 4: mod_base = OTHER; note = 2'-O-methyladenosine-3'-phosphate
  modified_base 5: mod_base = OTHER; note = 2'-deoxy-2'-fluoroguanosine-3'-phosphate
  modified_base 6: mod_base = OTHER; note = 2'-O-methyluridine-3'-phosphate
  modified_base 7: mod_base = OTHER; note = 2'-deoxy-2'-fluoroguanosine-3'-phosphate
  modified_base 8: mod_base = OTHER; note = 2'-O-methyluridine-3'-phosphate
  modified_base 9: mod_base = OTHER; note = 2'-deoxy-2'-fluorouridine-3'-phosphate
  modified_base 10: mod_base = OTHER; note = 2'-deoxy-2'-fluorocytidine-3'-phosphate
  modified_base 11: mod_base = OTHER; note = 2'-deoxy-2'-fluorouridine-3'-phosphate
  modified_base 12: mod_base = OTHER; note = 2'-O-methyluridine-3'-phosphate
  modified_base 13: mod_base = OTHER; note = 2'-deoxy-2'-fluoroguanosine-3'-phosphate
  modified_base 14: mod_base = OTHER; note = 2'-O-methylcytidine-3'-phosphate
  modified_base 15: mod_base = OTHER; note = 2'-deoxy-2'-fluorouridine-3'-phosphate
  modified_base 16: mod_base = OTHER; note = 2'-O-methylcytidine-3'-phosphate
  modified_base 17: mod_base = OTHER; note = 2'-deoxy-2'-fluorouridine-3'-phosphate
  modified_base 18: mod_base = OTHER; note = 2'-O-methyladenosine-3'-phosphate
  modified_base 19: mod_base = OTHER; note = 2'-deoxy-2'-fluorouridine-3'-phosphorothioate
  modified_base 20: mod_base = OTHER; note = 2'-O-methyladenosine-3'-phosphorothioate
  modified_base 21: mod_base = OTHER; note = 2'-deoxy-2'-fluoroadenosine
aacagtgttcttgctctataa

SEQ ID NO: 95 - RNA, 21 nt, synthetic construct
  source 1..21: mol_type = other RNA
  modified_base 1: mod_base = OTHER; note = 2'-O-methyluridine-3'-phosphorothioate
  modified_base 2: mod_base = OTHER; note = 2'-deoxy-2'-fluorouridine-3'-phosphorothioate
  modified_base 3: mod_base = OTHER; note = 2'-O-methyladenosine-3'-phosphate
  modified_base 4: mod_base = OTHER; note = 2'-deoxy-2'-fluorouridine-3'-phosphate
  modified_base 5: mod_base = OTHER; note = 2'-O-methyladenosine-3'-phosphate
  modified_base 6: mod_base = OTHER; note = 2'-deoxy-2'-fluoroguanosine-3'-phosphate
  modified_base 7: mod_base = OTHER; note = 2'-O-methyladenosine-3'-phosphate
  modified_base 8: mod_base = OTHER; note = 2'-deoxy-2'-fluoroguanosine-3'-phosphate
  modified_base 9: mod_base = OTHER; note = 2'-O-methylcytidine-3'-phosphate
  modified_base 10: mod_base = OTHER; note = 2'-deoxy-2'-fluoroadenosine-3'-phosphate
  modified_base 11: mod_base = OTHER; note = 2'-O-methyladenosine-3'-phosphate
  modified_base 12: mod_base = OTHER; note = 2'-O-methylguanosine-3'-phosphate
  modified_base 13: mod_base = OTHER; note = 2'-O-methyladenosine-3'-phosphate
  modified_base 14: mod_base = OTHER; note = 2'-deoxy-2'-fluoroadenosine-3'-phosphate
  modified_base 15: mod_base = OTHER; note = 2'-O-methylcytidine-3'-phosphate
  modified_base 16: mod_base = OTHER; note = 2'-deoxy-2'-fluoroadenosine-3'-phosphate
  modified_base 17: mod_base = OTHER; note = 2'-O-methylcytidine-3'-phosphate
  modified_base 18: mod_base = OTHER; note = 2'-deoxy-2'-fluorouridine-3'-phosphate
  modified_base 19: mod_base = OTHER; note = 2'-O-methylguanosine-3'-phosphorothioate
  modified_base 20: mod_base = OTHER; note = 2'-deoxy-2'-fluorouridine-3'-phosphorothioate
  modified_base 21: mod_base = OTHER; note = 2'-O-methyluridine-3'-phosphate ((2S,4R)-1-[29-[[2-(acetylamino)-2-deoxy-beta-D-galactopyra nosyl]oxy]-14,14-bis[[3-[[3-[[5-[[2-(acetylamino)-2-deoxy-b eta-D-galactopyranosyl]oxy]-1-oxopentyl]amino]propyl]amino] -3-oxopropoxy]methyl]-1,12,19,25-tetraoxo-16-oxa-13,20,24-t riazanonacos-1-yl]-4-hydroxy-2-pyrrolidinyl)methyl ester
ttatagagcaagaacactgtt

SEQ ID NO: 96 - RNA, 21 nt, synthetic construct
  source 1..21: mol_type = other RNA
  modified_base 1: mod_base = OTHER; note = 2'-deoxy-2'-fluoroadenosine-3'-phosphorothioate
  modified_base 2: mod_base = OTHER; note = 2'-O-methyladenosine-3'-phosphorothioate
  modified_base 3: mod_base = OTHER; note = 2'-deoxy-2'-fluorocytidine-3'-phosphate
  modified_base 4: mod_base = OTHER; note = 2'-O-methyladenosine-3'-phosphate
  modified_base 5: mod_base = OTHER; note = 2'-deoxy-2'-fluoroguanosine-3'-phosphate
  modified_base 6: mod_base = OTHER; note = 2'-O-methyluridine-3'-phosphate
  modified_base 7: mod_base = OTHER; note = 2'-deoxy-2'-fluoroguanosine-3'-phosphate
  modified_base 8: mod_base = OTHER; note = 2'-O-methyluridine-3'-phosphate
  modified_base 9: mod_base = OTHER; note = 2'-deoxy-2'-fluorouridine-3'-phosphate
  modified_base 10: mod_base = OTHER; note = 2'-deoxy-2'-fluorocytidine-3'-phosphate
  modified_base 11: mod_base = OTHER; note = 2'-deoxy-2'-fluorouridine-3'-phosphate
  modified_base 12: mod_base = OTHER; note = 2'-O-methyluridine-3'-phosphate
  modified_base 13: mod_base = OTHER; note = 2'-deoxy-2'-fluoroguanosine-3'-phosphate
  modified_base 14: mod_base = OTHER; note = 2'-O-methylcytidine-3'-phosphate
  modified_base 15: mod_base = OTHER; note = 2'-deoxy-2'-fluorouridine-3'-phosphate
  modified_base 16: mod_base = OTHER; note = 2'-O-methylcytidine-3'-phosphate
  modified_base 17: mod_base = OTHER; note = 2'-deoxy-2'-fluorouridine-3'-phosphate
  modified_base 18: mod_base = OTHER; note = 2'-O-methyladenosine-3'-phosphate
  modified_base 19: mod_base = OTHER; note = 2'-deoxy-2'-fluorouridine-3'-phosphorothioate
  modified_base 20: mod_base = OTHER; note = 2'-O-methyladenosine-3'-phosphorothioate
  modified_base 21: mod_base = OTHER; note = 2'-deoxy-2'-fluoroadenosine
aacagtgttcttgctctataa

SEQ ID NO: 97 - RNA, 22 nt, synthetic construct
  source 1..22: mol_type = other RNA
  modified_base 1: mod_base = OTHER; note = 2'-O-methyluridine-3'-phosphorothioate
  modified_base 2: mod_base = OTHER; note = 2'-deoxy-2'-fluorouridine-3'-phosphorothioate
  modified_base 3: mod_base = OTHER; note = 2'-O-methyladenosine-3'-phosphate
  modified_base 4: mod_base = OTHER; note = 2'-deoxy-2'-fluorouridine-3'-phosphate
  modified_base 5: mod_base = OTHER; note = 2'-O-methyladenosine-3'-phosphate
  modified_base 6: mod_base = OTHER; note = 2'-deoxy-2'-fluoroguanosine-3'-phosphate
  modified_base 7: mod_base = OTHER; note = 2'-O-methyladenosine-3'-phosphate
  modified_base 8: mod_base = OTHER; note = 2'-deoxy-2'-fluoroguanosine-3'-phosphate
  modified_base 9: mod_base = OTHER; note = 2'-O-methylcytidine-3'-phosphate
  modified_base 10: mod_base = OTHER; note = 2'-deoxy-2'-fluoroadenosine-3'-phosphate
  modified_base 11: mod_base = OTHER; note = 2'-O-methyladenosine-3'-phosphate
  modified_base 12: mod_base = OTHER; note = 2'-O-methylguanosine-3'-phosphate
  modified_base 13: mod_base = OTHER; note = 2'-O-methyladenosine-3'-phosphate
  modified_base 14: mod_base = OTHER; note = 2'-deoxy-2'-fluoroadenosine-3'-phosphate
  modified_base 15: mod_base = OTHER; note = 2'-O-methylcytidine-3'-phosphate
  modified_base 16: mod_base = OTHER; note = 2'-deoxy-2'-fluoroadenosine-3'-phosphate
  modified_base 17: mod_base = OTHER; note = 2'-O-methylcytidine-3'-phosphate
  modified_base 18: mod_base = OTHER; note = 2'-deoxy-2'-fluorouridine-3'-phosphate
  modified_base 19: mod_base = OTHER; note = 2'-O-methylguanosine-3'-phosphate
  modified_base 20: mod_base = OTHER; note = 2'-deoxy-2'-fluorouridine-3'-phosphorothioate
  modified_base 21: mod_base = OTHER; note = 2'-O-methyluridine-3'-phosphorothioate
  modified_base 22: mod_base = OTHER; note = 2'-O-methyluridine-3'-phosphate ((2S,4R)-1-[29-[[2-(acetylamino)-2-deoxy-beta-D-galactopyra nosyl]oxy]-14,14-bis[[3-[[3-[[5-[[2-(acetylamino)-2-deoxy-b eta-D-galactopyranosyl]oxy]-1-oxopentyl]amino]propyl]amino] -3-oxopropoxy]methyl]-1,12,19,25-tetraoxo-16-oxa-13,20,24-t riazanonacos-1-yl]-4-hydroxy-2-pyrrolidinyl)methyl ester
ttatagagcaagaacactgttt

SEQ ID NO: 98 - RNA, 21 nt, synthetic construct
  source 1..21: mol_type = other RNA
  modified_base 1: mod_base = OTHER; note = 2'-deoxy-2'-fluorouridine-3'-phosphorothioate
  modified_base 2: mod_base = OTHER; note = 2'-O-methylguanosine-3'-phosphorothioate
  modified_base 3: mod_base = OTHER; note = 2'-deoxy-2'-fluoroadenosine-3'-phosphate
  modified_base 4: mod_base = OTHER; note = 2'-O-methylcytidine-3'-phosphate
  modified_base 5: mod_base = OTHER; note = 2'-deoxy-2'-fluoroadenosine-3'-phosphate
  modified_base 6: mod_base = OTHER; note = 2'-O-methyladenosine-3'-phosphate
  modified_base 7: mod_base = OTHER; note = 2'-deoxy-2'-fluoroadenosine-3'-phosphate
  modified_base 8: mod_base = OTHER; note = 2'-O-methyladenosine-3'-phosphate
  modified_base 9: mod_base = OTHER; note = 2'-deoxy-2'-fluorouridine-3'-phosphate
  modified_base 10: mod_base = OTHER; note = 2'-deoxy-2'-fluoroadenosine-3'-phosphate
  modified_base 11: mod_base = OTHER; note = 2'-deoxy-2'-fluoroadenosine-3'-phosphate
  modified_base 12: mod_base = OTHER; note = 2'-O-methylcytidine-3'-phosphate
  modified_base 13: mod_base = OTHER; note = 2'-deoxy-2'-fluorouridine-3'-phosphate
  modified_base 14: mod_base = OTHER; note = 2'-O-methylcytidine-3'-phosphate
  modified_base 15: mod_base = OTHER; note = 2'-deoxy-2'-fluoroadenosine-3'-phosphate
  modified_base 16: mod_base = OTHER; note = 2'-O-methylcytidine-3'-phosphate
  modified_base 17: mod_base = OTHER; note = 2'-deoxy-2'-fluorouridine-3'-phosphate
  modified_base 18: mod_base = OTHER; note = 2'-O-methyladenosine-3'-phosphate
  modified_base 19: mod_base = OTHER; note = 2'-deoxy-2'-fluorouridine-3'-phosphate
  modified_base 20: mod_base = OTHER; note = 2'-O-methyladenosine-3'-phosphate
  modified_base 21: mod_base = OTHER; note = 2'-deoxy-2'-fluoroadenosine-3'-phosphate ((2S,4R)-1-[29-[[2-(acetylamino)-2-deoxy-beta-D-galactopyra nosyl]oxy]-14,14-bis[[3-[[3-[[5-[[2-(acetylamino)-2-deoxy-b eta-D-galactopyranosyl]oxy]-1-oxopentyl]amino]propyl]amino] -3-oxopropoxy]methyl]-1,12,19,25-tetraoxo-16-oxa-13,20,24-t riazanonacos-1-yl]-4-hydroxy-2-pyrrolidinyl)methyl ester
tgacaaaataactcactataa

SEQ ID NO: 99 - RNA, 23 nt, synthetic construct
  source 1..23: mol_type = other RNA
  modified_base 1: mod_base = OTHER; note = 2'-O-methyluridine-3'-phosphorothioate
  modified_base 2: mod_base = OTHER; note = 2'-deoxy-2'-fluorouridine-3'-phosphorothioate
  modified_base 3: mod_base = OTHER; note = 2'-O-methyladenosine-3'-phosphate
  modified_base 4: mod_base = OTHER; note = 2'-deoxy-2'-fluorouridine-3'-phosphate
  modified_base 5: mod_base = OTHER; note = 2'-O-methyladenosine-3'-phosphate
  modified_base 6: mod_base = OTHER; note = 2'-deoxy-2'-fluoroguanosine-3'-phosphate
  modified_base 7: mod_base = OTHER; note = 2'-O-methyluridine-3'-phosphate
  modified_base 8: mod_base = OTHER; note = 2'-deoxy-2'-fluoroguanosine-3'-phosphate
  modified_base 9: mod_base = OTHER; note = 2'-O-methyladenosine-3'-phosphate
  modified_base 10: mod_base = OTHER; note = 2'-deoxy-2'-fluoroguanosine-3'-phosphate
  modified_base 11: mod_base = OTHER; note = 2'-O-methyluridine-3'-phosphate
  modified_base 12: mod_base = OTHER; note = 2'-O-methyluridine-3'-phosphate
  modified_base 13: mod_base = OTHER; note = 2'-O-methyladenosine-3'-phosphate
  modified_base 14: mod_base = OTHER; note = 2'-deoxy-2'-fluorouridine-3'-phosphate
  modified_base 15: mod_base = OTHER; note = 2'-O-methyluridine-3'-phosphate
  modified_base 16: mod_base = OTHER; note = 2'-deoxy-2'-fluorouridine-3'-phosphate
  modified_base 17: mod_base = OTHER; note = 2'-O-methyluridine-3'-phosphate
  modified_base 18: mod_base = OTHER; note = 2'-deoxy-2'-fluoroguanosine-3'-phosphate
  modified_base 19: mod_base = OTHER; note = 2'-O-methyluridine-3'-phosphate
  modified_base 20: mod_base = OTHER; note = 2'-deoxy-2'-fluorocytidine-3'-phosphate
  modified_base 21: mod_base = OTHER; note = 2'-O-methyladenosine-3'-phosphorothioate
  modified_base 22: mod_base = OTHER; note = 2'-O-methyladenosine-3'-phosphorothioate
  modified_base 23: mod_base = OTHER; note = 2'-O-methyluridine
ttatagtgagttattttgtcaat

SEQ ID NO: 100 - RNA, 21 nt, synthetic construct
  source 1..21: mol_type = other RNA
  modified_base 1: mod_base = OTHER; note = 2'-deoxy-2'-fluorouridine-3'-phosphorothioate
  modified_base 2: mod_base = OTHER; note = 2'-O-methylguanosine-3'-phosphorothioate
  modified_base 3: mod_base = OTHER; note = 2'-deoxy-2'-fluoroadenosine-3'-phosphate
  modified_base 4: mod_base = OTHER; note = 2'-O-methylcytidine-3'-phosphate
  modified_base 5: mod_base = OTHER; note = 2'-deoxy-2'-fluoroadenosine-3'-phosphate
  modified_base 6: mod_base = OTHER; note = 2'-O-methyladenosine-3'-phosphate
  modified_base 7: mod_base = OTHER; note = 2'-deoxy-2'-fluoroadenosine-3'-phosphate
  modified_base 8: mod_base = OTHER; note = 2'-O-methyladenosine-3'-phosphate
  modified_base 9: mod_base = OTHER; note = 2'-deoxy-2'-fluorouridine-3'-phosphate
  modified_base 10: mod_base = OTHER; note = 2'-deoxy-2'-fluoroadenosine-3'-phosphate
  modified_base 11: mod_base = OTHER; note = 2'-deoxy-2'-fluoroadenosine-3'-phosphate
  modified_base 12: mod_base = OTHER; note = 2'-O-methylcytidine-3'-phosphate
  modified_base 13: mod_base = OTHER; note = 2'-deoxy-2'-fluorouridine-3'-phosphate
  modified_base 14: mod_base = OTHER; note = 2'-O-methylcytidine-3'-phosphate
  modified_base 15: mod_base = OTHER; note = 2'-deoxy-2'-fluoroadenosine-3'-phosphate
  modified_base 16: mod_base = OTHER; note = 2'-O-methylcytidine-3'-phosphate
  modified_base 17: mod_base = OTHER; note = 2'-deoxy-2'-fluorouridine-3'-phosphate
  modified_base 18: mod_base = OTHER; note = 2'-O-methyladenosine-3'-phosphate
  modified_base 19: mod_base = OTHER; note = 2'-deoxy-2'-fluorouridine-3'-phosphorothioate
  modified_base 20: mod_base = OTHER; note = 2'-O-methyladenosine-3'-phosphorothioate
  modified_base 21: mod_base = OTHER; note = 2'-deoxy-2'-fluoroadenosine
tgacaaaataactcactataa

SEQ ID NO: 101 - RNA, 23 nt, synthetic construct
  source 1..23: mol_type = other RNA
  modified_base 1: mod_base = OTHER; note = 2'-O-methyluridine-3'-phosphorothioate
  modified_base 2: mod_base = OTHER; note = 2'-deoxy-2'-fluorouridine-3'-phosphorothioate
  modified_base 3: mod_base = OTHER; note = 2'-O-methyladenosine-3'-phosphate
  modified_base 4: mod_base = OTHER; note = 2'-deoxy-2'-fluorouridine-3'-phosphate
  modified_base 5: mod_base = OTHER; note = 2'-O-methyladenosine-3'-phosphate
  modified_base 6: mod_base = OTHER; note = 2'-deoxy-2'-fluoroguanosine-3'-phosphate
  modified_base 7: mod_base = OTHER; note = 2'-O-methyluridine-3'-phosphate
  modified_base 8: mod_base = OTHER; note = 2'-deoxy-2'-fluoroguanosine-3'-phosphate
  modified_base 9: mod_base = OTHER; note = 2'-O-methyladenosine-3'-phosphate
  modified_base 10: mod_base = OTHER; note = 2'-deoxy-2'-fluoroguanosine-3'-phosphate
  modified_base 11: mod_base = OTHER; note = 2'-O-methyluridine-3'-phosphate
  modified_base 12: mod_base = OTHER; note = 2'-O-methyluridine-3'-phosphate
  modified_base 13: mod_base = OTHER; note = 2'-O-methyladenosine-3'-phosphate
  modified_base 14: mod_base = OTHER; note = 2'-deoxy-2'-fluorouridine-3'-phosphate
  modified_base 15: mod_base = OTHER; note = 2'-O-methyluridine-3'-phosphate
  modified_base 16: mod_base = OTHER; note = 2'-deoxy-2'-fluorouridine-3'-phosphate
  modified_base 17: mod_base = OTHER; note = 2'-O-methyluridine-3'-phosphate
  modified_base 18: mod_base = OTHER; note = 2'-deoxy-2'-fluoroguanosine-3'-phosphate
  modified_base 19: mod_base = OTHER; note = 2'-O-methyluridine-3'-phosphate
  modified_base 20: mod_base = OTHER; note = 2'-deoxy-2'-fluorocytidine-3'-phosphate
  modified_base 21: mod_base = OTHER; note = 2'-O-methyladenosine-3'-phosphorothioate
  modified_base 22: mod_base = OTHER; note = 2'-O-methyladenosine-3'-phosphorothioate
  modified_base 23: mod_base = OTHER; note = 2'-O-methyluridine-3'-phosphate ((2S,4R)-1-[29-[[2-(acetylamino)-2-deoxy-beta-D-galactopyra nosyl]oxy]-14,14-bis[[3-[[3-[[5-[[2-(acetylamino)-2-deoxy-b eta-D-galactopyranosyl]oxy]-1-oxopentyl]amino]propyl]amino] -3-oxopropoxy]methyl]-1,12,19,25-tetraoxo-16-oxa-13,20,24-t riazanonacos-1-yl]-4-hydroxy-2-pyrrolidinyl)methyl ester
ttatagtgagttattttgtcaat

SEQ ID NO: 102 - RNA, 21 nt, synthetic construct
  source 1..21: mol_type = other RNA
  modified_base 1: mod_base = OTHER; note = 2'-deoxy-2'-fluorouridine-3'-phosphorothioate
  modified_base 2: mod_base = OTHER; note = 2'-O-methylguanosine-3'-phosphorothioate
  modified_base 3: mod_base = OTHER; note = 2'-deoxy-2'-fluoroadenosine-3'-phosphate
  modified_base 4: mod_base = OTHER; note = 2'-O-methylcytidine-3'-phosphate
  modified_base 5: mod_base = OTHER; note = 2'-deoxy-2'-fluoroadenosine-3'-phosphate
  modified_base 6: mod_base = OTHER; note = 2'-O-methyladenosine-3'-phosphate
  modified_base 7: mod_base = OTHER; note = 2'-deoxy-2'-fluoroadenosine-3'-phosphate
  modified_base 8: mod_base = OTHER; note = 2'-O-methyladenosine-3'-phosphate
  modified_base 9: mod_base = OTHER; note = 2'-deoxy-2'-fluorouridine-3'-phosphate
  modified_base 10: mod_base = OTHER; note = 2'-deoxy-2'-fluoroadenosine-3'-phosphate
  modified_base 11: mod_base = OTHER; note = 2'-deoxy-2'-fluoroadenosine-3'-phosphate
  modified_base 12: mod_base = OTHER; note = 2'-O-methylcytidine-3'-phosphate
  modified_base 13: mod_base = OTHER; note = 2'-deoxy-2'-fluorouridine-3'-phosphate
  modified_base 14: mod_base = OTHER; note = 2'-O-methylcytidine-3'-phosphate
  modified_base 15: mod_base = OTHER; note = 2'-deoxy-2'-fluoroadenosine-3'-phosphate
  modified_base 16: mod_base = OTHER; note = 2'-O-methylcytidine-3'-phosphate
  modified_base 17: mod_base = OTHER; note = 2'-deoxy-2'-fluorouridine-3'-phosphate
  modified_base 18: mod_base = OTHER; note = 2'-O-methyladenosine-3'-phosphate
  modified_base 19: mod_base = OTHER; note = 2'-deoxy-2'-fluorouridine-3'-phosphorothioate
  modified_base 20: mod_base = OTHER; note = 2'-O-methyladenosine-3'-phosphorothioate
  modified_base 21: mod_base = OTHER; note = 2'-deoxy-2'-fluoroadenosine
tgacaaaataactcactataa

SEQ ID NO: 103 - RNA, 23 nt, synthetic construct
  source 1..23: mol_type = other RNA
  modified_base 1: mod_base = OTHER; note = 2'-O-methyluridine-3'-phosphorothioate
  modified_base 2: mod_base = OTHER; note = 2'-deoxy-2'-fluorouridine-3'-phosphorothioate
  modified_base 3: mod_base = OTHER; note = 2'-O-methyladenosine-3'-phosphate
  modified_base 4: mod_base = OTHER; note = 2'-deoxy-2'-fluorouridine-3'-phosphate
  modified_base 5: mod_base = OTHER; note = 2'-O-methyladenosine-3'-phosphate
  modified_base 6: mod_base = OTHER; note = 2'-deoxy-2'-fluoroguanosine-3'-phosphate
  modified_base 7: mod_base = OTHER; note = 2'-O-methyluridine-3'-phosphate
  modified_base 8: mod_base = OTHER; note = 2'-deoxy-2'-fluoroguanosine-3'-phosphate
  modified_base 9: mod_base = OTHER; note = 2'-O-methyladenosine-3'-phosphate
  modified_base 10: mod_base = OTHER; note = 2'-deoxy-2'-fluoroguanosine-3'-phosphate
  modified_base 11: mod_base = OTHER; note = 2'-O-methyluridine-3'-phosphate
  modified_base 12: mod_base = OTHER; note = 2'-O-methyluridine-3'-phosphate
  modified_base 13: mod_base = OTHER; note = 2'-O-methyladenosine-3'-phosphate
  modified_base 14: mod_base = OTHER; note = 2'-deoxy-2'-fluorouridine-3'-phosphate
  modified_base 15: mod_base = OTHER; note = 2'-O-methyluridine-3'-phosphate
  modified_base 16: mod_base = OTHER; note = 2'-deoxy-2'-fluorouridine-3'-phosphate
  modified_base 17: mod_base = OTHER; note = 2'-O-methyluridine-3'-phosphate
  modified_base 18: mod_base = OTHER; note = 2'-deoxy-2'-fluoroguanosine-3'-phosphate
  modified_base 19: mod_base = OTHER; note = 2'-O-methyluridine-3'-phosphate
  modified_base 20: mod_base = OTHER; note = 2'-deoxy-2'-fluorocytidine-3'-phosphate
  modified_base 21: mod_base = OTHER; note = 2'-O-methyladenosine-3'-phosphate
  modified_base 22: mod_base = OTHER; note = 2'-O-methyladenosine-3'-phosphate
  modified_base 23: mod_base = OTHER; note = 2'-O-methyluridine-3'-phosphate ((2S,4R)-1-[29-[[2-(acetylamino)-2-deoxy-beta-D-galactopyra nosyl]oxy]-14,14-bis[[3-[[3-[[5-[[2-(acetylamino)-2-deoxy-b eta-D-galactopyranosyl]oxy]-1-oxopentyl]amino]propyl]amino] -3-oxopropoxy]methyl]-1,12,19,25-tetraoxo-16-oxa-13,20,24-t riazanonacos-1-yl]-4-hydroxy-2-pyrrolidinyl)methyl ester
ttatagtgagttattttgtcaat

SEQ ID NO: 104 - RNA, 23 nt, synthetic construct
  source 1..23: mol_type = other RNA
  modified_base 1: mod_base = OTHER; note = 2'-O-methyluridine-3'-phosphorothioate 5'-(E)-Vinylphosphonate
  modified_base 2: mod_base = OTHER; note = 2'-deoxy-2'-fluorouridine-3'-phosphorothioate
  modified_base 3: mod_base = OTHER; note = 2'-O-methyladenosine-3'-phosphate
  modified_base 4: mod_base = OTHER; note = 2'-deoxy-2'-fluorouridine-3'-phosphorothioate
  modified_base 5: mod_base = OTHER; note = 2'-O-methyladenosine-3'-phosphate
  modified_base 6: mod_base = OTHER; note = 2'-deoxy-2'-fluoroguanosine-3'-phosphorothioate
  modified_base 7: mod_base = OTHER; note = 2'-O-methyladenosine-3'-phosphate
  modified_base 8: mod_base = OTHER; note = 2'-deoxy-2'-fluoroguanosine-3'-phosphorothioate
  modified_base 9: mod_base = OTHER; note = 2'-O-methylcytidine-3'-phosphate
  modified_base 10: mod_base = OTHER; note = 2'-deoxy-2'-fluoroadenosine-3'-phosphorothioate
  modified_base 11: mod_base = OTHER; note = 2'-O-methyladenosine-3'-phosphate
  modified_base 12: mod_base = OTHER; note = 2'-O-methylguanosine-3'-phosphorothioate
  modified_base 13: mod_base = OTHER; note = 2'-O-methyladenosine-3'-phosphate
  modified_base 14: mod_base = OTHER; note = 2'-deoxy-2'-fluoroadenosine-3'-phosphorothioate
  modified_base 15: mod_base = OTHER; note = 2'-O-methylcytidine-3'-phosphate
  modified_base 16: mod_base = OTHER; note = 2'-deoxy-2'-fluoroadenosine-3'-phosphorothioate
  modified_base 17: mod_base = OTHER; note = 2'-O-methylcytidine-3'-phosphate
  modified_base 18: mod_base = OTHER; note = 2'-deoxy-2'-fluorouridine-3'-phosphorothioate
  modified_base 19: mod_base = OTHER; note = 2'-O-methylguanosine-3'-phosphate
  modified_base 20: mod_base = OTHER; note = 2'-deoxy-2'-fluorouridine-3'-phosphorothioate
  modified_base 21: mod_base = OTHER; note = 2'-O-methyluridine-3'-phosphorothioate
  modified_base 22: mod_base = OTHER; note = 2'-O-methyluridine-3'-phosphorothioate
  modified_base 23: mod_base = OTHER; note = 2'-O-methyluridine-3'-phosphate ((2S,4R)-1-[29-[[2-(acetylamino)-2-deoxy-beta-D-galactopyra nosyl]oxy]-14,14-bis[[3-[[3-[[5-[[2-(acetylamino)-2-deoxy-b eta-D-galactopyranosyl]oxy]-1-oxopentyl]amino]propyl]amino] -3-oxopropoxy]methyl]-1,12,19,25-tetraoxo-16-oxa-13,20,24-t riazanonacos-1-yl]-4-hydroxy-2-pyrrolidinyl)methyl ester
ttatagagcaagaacactgtttt

SEQ ID NO: 105 - RNA, 23 nt, synthetic construct
  source 1..23: mol_type = other RNA
  modified_base 1: mod_base = OTHER; note = 2'-O-methyluridine-3'-phosphorothioate 5'-(E)-Vinylphosphonate
  modified_base 2: mod_base = OTHER; note = 2'-deoxy-2'-fluorouridine-3'-phosphorothioate
  modified_base 3: mod_base = OTHER; note = 2'-O-methyladenosine-3'-phosphate
  modified_base 4: mod_base = OTHER; note = 2'-O-methyluridine-3'-phosphorothioate
  modified_base 5: mod_base = OTHER; note = 2'-O-methyladenosine-3'-phosphate
  modified_base 6: mod_base = OTHER; note = 2'-deoxy-2'-fluoroguanosine-3'-phosphorothioate
  modified_base 7: mod_base = OTHER; note = 2'-O-methyladenosine-3'-phosphate
  modified_base 8: mod_base = OTHER; note = 2'-deoxy-2'-fluoroguanosine-3'-phosphorothioate
  modified_base 9: mod_base = OTHER; note = 2'-deoxy-2'-fluorocytidine-3'-phosphorothioate
  modified_base 10: mod_base = OTHER; note = 2'-O-methyladenosine-3'-phosphate
  modified_base 11: mod_base = OTHER; note = 2'-O-methyladenosine-3'-phosphorothioate
  modified_base 12: mod_base = OTHER; note = 2'-O-methylguanosine-3'-phosphate
  modified_base 13: mod_base = OTHER; note = 2'-O-methyladenosine-3'-phosphorothioate
  modified_base 14: mod_base = OTHER; note = 2'-deoxy-2'-fluoroadenosine-3'-phosphorothioate
  modified_base 15: mod_base = OTHER; note = 2'-O-methylcytidine-3'-phosphate
  modified_base 16: mod_base = OTHER; note = 2'-deoxy-2'-fluoroadenosine-3'-phosphorothioate
  modified_base 17: mod_base = OTHER; note = 2'-O-methylcytidine-3'-phosphate
  modified_base 18: mod_base = OTHER; note = 2'-O-methyluridine-3'-phosphorothioate
  modified_base 19: mod_base = OTHER; note = 2'-O-methylguanosine-3'-phosphate
  modified_base 20: mod_base = OTHER; note = 2'-O-methyluridine-3'-phosphorothioate
  modified_base 21: mod_base = OTHER; note = 2'-O-methyluridine-3'-phosphorothioate
  modified_base 22: mod_base = OTHER; note = 2'-O-methyluridine-3'-phosphorothioate
  modified_base 23: mod_base = OTHER; note = 2'-O-methyluridine-3'-phosphate ((2S,4R)-1-[29-[[2-(acetylamino)-2-deoxy-beta-D-galactopyra nosyl]oxy]-14,14-bis[[3-[[3-[[5-[[2-(acetylamino)-2-deoxy-b eta-D-galactopyranosyl]oxy]-1-oxopentyl]amino]propyl]amino] -3-oxopropoxy]methyl]-1,12,19,25-tetraoxo-16-oxa-13,20,24-t riazanonacos-1-yl]-4-hydroxy-2-pyrrolidinyl)methyl ester
ttatagagcaagaacactgtttt

SEQ ID NO: 106 - RNA, 21 nt, synthetic construct
  source 1..21: mol_type = other RNA
  modified_base 1: mod_base = OTHER; note = 2'-deoxy-2'-fluoroadenosine-3'-phosphorothioate
  modified_base 2: mod_base = OTHER; note = 2'-O-methyladenosine-3'-phosphorothioate
  modified_base 3: mod_base = OTHER; note = 2'-deoxy-2'-fluorocytidine-3'-phosphate
  modified_base 4: mod_base = OTHER; note = 2'-O-methyladenosine-3'-phosphate
  modified_base 5: mod_base = OTHER; note = 2'-deoxy-2'-fluoroguanosine-3'-phosphate
  modified_base 6: mod_base = OTHER; note = 2'-O-methyluridine-3'-phosphate
  modified_base 7: mod_base = OTHER; note = 2'-deoxy-2'-fluoroguanosine-3'-phosphate
  modified_base 8: mod_base = OTHER; note = 2'-O-methyluridine-3'-phosphate
  modified_base 9: mod_base = OTHER; note = 2'-deoxy-2'-fluorouridine-3'-phosphate
  modified_base 10: mod_base = OTHER; note = 2'-deoxy-2'-fluorocytidine-3'-phosphate
  modified_base 11: mod_base = OTHER; note = 2'-deoxy-2'-fluorouridine-3'-phosphate
  modified_base 12: mod_base = OTHER; note = 2'-O-methyluridine-3'-phosphate
  modified_base 13: mod_base = OTHER; note = 2'-deoxy-2'-fluoroguanosine-3'-phosphate
  modified_base 14: mod_base = OTHER; note = 2'-O-methylcytidine-3'-phosphate
  modified_base 15: mod_base = OTHER; note = 2'-deoxy-2'-fluorouridine-3'-phosphate
  modified_base 16: mod_base = OTHER; note = 2'-O-methylcytidine-3'-phosphate
  modified_base 17: mod_base = OTHER; note = 2'-deoxy-2'-fluorouridine-3'-phosphate
  modified_base 18: mod_base = OTHER; note = 2'-O-methyladenosine-3'-phosphate
  modified_base 19: mod_base = OTHER; note = 2'-deoxy-2'-fluorouridine-3'-phosphate
  modified_base 20: mod_base = OTHER; note = 2'-O-methyladenosine-3'-phosphate
  modified_base 21: mod_base = OTHER; note = 2'-deoxy-2'-fluoroadenosine-3'-phosphate ((2S,4R)-1-[29-[[2-(acetylamino)-2-deoxy-beta-D-galactopyra nosyl]oxy]-14,14-bis[[3-[[3-[[5-[[2-(acetylamino)-2-deoxy-b eta-D-galactopyranosyl]oxy]-1-oxopentyl]amino]propyl]amino] -3-oxopropoxy]methyl]-1,12,19,25-tetraoxo-16-oxa-13,20,24-t riazanonacos-1-yl]-4-hydroxy-2-pyrrolidinyl)methyl ester
aacagtgttcttgctctataa

SEQ ID NO: 107 - RNA, 21 nt, synthetic construct
  source 1..21: mol_type = other RNA
  modified_base 1: mod_base = OTHER; note = 2'-deoxy-2'-fluoroadenosine-3'-phosphorothioate
  modified_base 2: mod_base = OTHER; note = 2'-O-methyladenosine-3'-phosphorothioate
  modified_base 3: mod_base = OTHER; note = 2'-deoxy-2'-fluorocytidine-3'-phosphate
  modified_base 4: mod_base = OTHER; note = 2'-O-methyladenosine-3'-phosphate
  modified_base 5: mod_base = OTHER; note = 2'-deoxy-2'-fluoroguanosine-3'-phosphate
  modified_base 6: mod_base = OTHER; note = 2'-O-methyluridine-3'-phosphate
  modified_base 7: mod_base = OTHER; note = 2'-deoxy-2'-fluoroguanosine-3'-phosphate
  modified_base 8: mod_base = OTHER; note = 2'-O-methyluridine-3'-phosphate
  modified_base 9: mod_base = OTHER; note = 2'-deoxy-2'-fluorouridine-3'-phosphate
  modified_base 10: mod_base = OTHER; note = 2'-deoxy-2'-fluorocytidine-3'-phosphate
  modified_base 11: mod_base = OTHER; note = 2'-deoxy-2'-fluorouridine-3'-phosphate
  modified_base 12: mod_base = OTHER; note = 2'-O-methyluridine-3'-phosphate
  modified_base 13: mod_base = OTHER; note = 2'-deoxy-2'-fluoroguanosine-3'-phosphate
  modified_base 14: mod_base = OTHER; note = 2'-O-methylcytidine-3'-phosphate
  modified_base 15: mod_base = OTHER; note = 2'-deoxy-2'-fluorouridine-3'-phosphate
  modified_base 16: mod_base = OTHER; note = 2'-O-methylcytidine-3'-phosphate
  modified_base 17: mod_base = OTHER; note = 2'-deoxy-2'-fluorouridine-3'-phosphate
  modified_base 18: mod_base = OTHER; note = 2'-O-methyladenosine-3'-phosphate
  modified_base 19: mod_base = OTHER; note = 2'-deoxy-2'-fluorouridine-3'-phosphorothioate
  modified_base 20: mod_base = OTHER; note = 2'-O-methyladenosine-3'-phosphorothioate
  modified_base 21: mod_base = OTHER; note = 2'-deoxy-2'-fluoroadenosine
aacagtgttcttgctctataa

SEQ ID NO: 108 - RNA, 21 nt, synthetic construct
  source 1..21: mol_type = other RNA
  modified_base 1: mod_base = OTHER; note = 2'-deoxy-2'-fluoroadenosine-3'-phosphorothioate
  modified_base 2: mod_base = OTHER; note = 2'-O-methyladenosine-3'-phosphorothioate
  modified_base 3: mod_base = OTHER; note = 2'-deoxy-2'-fluorocytidine-3'-phosphate
  modified_base 4: mod_base = OTHER; note = 2'-O-methyladenosine-3'-phosphate
  modified_base 5: mod_base = OTHER; note = 2'-deoxy-2'-fluoroguanosine-3'-phosphate
  modified_base 6: mod_base = OTHER; note = 2'-O-methyluridine-3'-phosphate
  modified_base 7: mod_base = OTHER; note = 2'-deoxy-2'-fluoroguanosine-3'-phosphate
  modified_base 8: mod_base = OTHER; note = 2'-O-methyluridine-3'-phosphate
  modified_base 9: mod_base = OTHER; note = 2'-deoxy-2'-fluorouridine-3'-phosphate
  modified_base 10: mod_base = OTHER; note = 2'-deoxy-2'-fluorocytidine-3'-phosphate
  modified_base 11: mod_base = OTHER; note = 2'-deoxy-2'-fluorouridine-3'-phosphate
  modified_base 12: mod_base = OTHER; note = 2'-O-methyluridine-3'-phosphate
  modified_base 13: mod_base = OTHER; note = 2'-deoxy-2'-fluoroguanosine-3'-phosphate
  modified_base 14: mod_base = OTHER; note = 2'-O-methylcytidine-3'-phosphate
  modified_base 15: mod_base = OTHER; note = 2'-deoxy-2'-fluorouridine-3'-phosphate
  modified_base 16: mod_base = OTHER; note = 2'-O-methylcytidine-3'-phosphate
  modified_base 17: mod_base = OTHER; note = 2'-deoxy-2'-fluorouridine-3'-phosphate
  modified_base 18: mod_base = OTHER; note = 2'-O-methyladenosine-3'-phosphate
  modified_base 19: mod_base = OTHER; note = 2'-deoxy-2'-fluorouridine-3'-phosphorothioate
  modified_base 20: mod_base = OTHER; note = 2'-O-methyladenosine-3'-phosphorothioate
  modified_base 21: mod_base = OTHER; note = 2'-deoxy-2'-fluoroadenosine
aacagtgttcttgctctataa

SEQ ID NO: 109 - RNA, 21 nt, synthetic construct
  source 1..21: mol_type = other RNA
  modified_base 1: mod_base = OTHER; note = 2'-deoxy-2'-fluoroadenosine-3'-phosphorothioate
  modified_base 2: mod_base = OTHER; note = 2'-O-methyladenosine-3'-phosphorothioate
  modified_base 3: mod_base = OTHER; note = 2'-deoxy-2'-fluorocytidine-3'-phosphate
  modified_base 4: mod_base = OTHER; note = 2'-O-methyladenosine-3'-phosphate
  modified_base 5: mod_base = OTHER; note = 2'-deoxy-2'-fluoroguanosine-3'-phosphate
  modified_base 6: mod_base = OTHER; note = 2'-O-methyluridine-3'-phosphate
  modified_base 7: mod_base = OTHER; note = 2'-deoxy-2'-fluoroguanosine-3'-phosphate
  modified_base 8: mod_base = OTHER; note = 2'-O-methyluridine-3'-phosphate
  modified_base 9: mod_base = OTHER; note = 2'-deoxy-2'-fluorouridine-3'-phosphate
  modified_base 10: mod_base = OTHER; note = 2'-deoxy-2'-fluorocytidine-3'-phosphate
  modified_base 11: mod_base = OTHER; note = 2'-deoxy-2'-fluorouridine-3'-phosphate
  modified_base 12: mod_base = OTHER; note = 2'-O-methyluridine-3'-phosphate
  modified_base 13: mod_base = OTHER; note = 2'-deoxy-2'-fluoroguanosine-3'-phosphate
  modified_base 14: mod_base = OTHER; note = 2'-O-methylcytidine-3'-phosphate
  modified_base 15: mod_base = OTHER; note = 2'-deoxy-2'-fluorouridine-3'-phosphate
  modified_base 16: mod_base = OTHER; note = 2'-O-methylcytidine-3'-phosphate
  modified_base 17: mod_base = OTHER; note = 2'-deoxy-2'-fluorouridine-3'-phosphate
  modified_base 18: mod_base = OTHER; note = 2'-O-methyladenosine-3'-phosphate
  modified_base 19: mod_base = OTHER; note = 2'-deoxy-2'-fluorouridine-3'-phosphorothioate
  modified_base 20: mod_base = OTHER; note = 2'-O-methyladenosine-3'-phosphorothioate
  modified_base 21: mod_base = OTHER; note = 2'-deoxy-2'-fluoroadenosine-3'-phosphate ((2S,4R)-1-[29-[[2-(acetylamino)-2-deoxy-beta-D-galactopyra nosyl]oxy]-14,14-bis[[3-[[3-[[5-[[2-(acetylamino)-2-deoxy-b eta-D-galactopyranosyl]oxy]-1-oxopentyl]amino]propyl]amino] -3-oxopropoxy]methyl]-1,12,19,25-tetraoxo-16-oxa-13,20,24-t riazanonacos-1-yl]-4-hydroxy-2-pyrrolidinyl)methyl ester
aacagtgttcttgctctataa

SEQ ID NO: 110 - RNA, 21 nt, synthetic construct
  source 1..21: mol_type = other RNA
  modified_base 1: mod_base = OTHER; note = 2'-deoxy-2'-fluoroadenosine-3'-phosphorothioate
  modified_base 2: mod_base = OTHER; note = 2'-O-methyladenosine-3'-phosphorothioate
  modified_base 3: mod_base = OTHER; note = 2'-deoxy-2'-fluorocytidine-3'-phosphate
  modified_base 4: mod_base = OTHER; note = 2'-O-methyladenosine-3'-phosphate
  modified_base 5: mod_base = OTHER; note = 2'-deoxy-2'-fluoroguanosine-3'-phosphate
  modified_base 6: mod_base = OTHER; note = 2'-O-methyluridine-3'-phosphate
  modified_base 7: mod_base = OTHER; note = 2'-deoxy-2'-fluoroguanosine-3'-phosphate
  modified_base 8: mod_base = OTHER; note = 2'-O-methyluridine-3'-phosphate
  modified_base 9: mod_base = OTHER; note = 2'-deoxy-2'-fluorouridine-3'-phosphate
  modified_base 10: mod_base = OTHER; note = 2'-deoxy-2'-fluorocytidine-3'-phosphate
  modified_base 11: mod_base = OTHER; note = 2'-deoxy-2'-fluorouridine-3'-phosphate
  modified_base 12: mod_base = OTHER; note = 2'-O-methyluridine-3'-phosphate
  modified_base 13: mod_base = OTHER; note = 2'-deoxy-2'-fluoroguanosine-3'-phosphate
  modified_base 14: mod_base = OTHER; note = 2'-O-methylcytidine-3'-phosphate
  modified_base 15: mod_base = OTHER; note = 2'-deoxy-2'-fluorouridine-3'-phosphate
  modified_base 16: mod_base = OTHER; note = 2'-O-methylcytidine-3'-phosphate
  modified_base 17: mod_base = OTHER; note = 2'-deoxy-2'-fluorouridine-3'-phosphate
  modified_base 18: mod_base = OTHER; note = 2'-O-methyladenosine-3'-phosphate
  modified_base 19: mod_base = OTHER; note = 2'-deoxy-2'-fluorouridine-3'-phosphorothioate
  modified_base 20: mod_base = OTHER; note = 2'-O-methyladenosine-3'-phosphorothioate
  modified_base 21: mod_base = OTHER; note = 2'-deoxy-2'-fluoroadenosine
aacagtgttcttgctctataa

SEQ ID NO: 111 - RNA, 21 nt, synthetic construct
  source 1..21: mol_type = other RNA
  modified_base 1: mod_base = OTHER; note = 2'-deoxy-2'-fluoroadenosine-3'-phosphorothioate
  modified_base 2: mod_base = OTHER; note = 2'-O-methyladenosine-3'-phosphorothioate
  modified_base 3: mod_base = OTHER; note = 2'-deoxy-2'-fluorocytidine-3'-phosphate
  modified_base 4: mod_base = OTHER; note = 2'-O-methyladenosine-3'-phosphate
  modified_base 5: mod_base = OTHER; note = 2'-deoxy-2'-fluoroguanosine-3'-phosphate
  modified_base 6: mod_base = OTHER; note = 2'-O-methyluridine-3'-phosphate
  modified_base 7: mod_base = OTHER; note = 2'-deoxy-2'-fluoroguanosine-3'-phosphate
  modified_base 8: mod_base = OTHER; note = 2'-O-methyluridine-3'-phosphate
  modified_base 9: mod_base = OTHER; note = 2'-deoxy-2'-fluorouridine-3'-phosphate
  modified_base 10: mod_base = OTHER; note = 2'-deoxy-2'-fluorocytidine-3'-phosphate
  modified_base 11: mod_base = OTHER; note = 2'-deoxy-2'-fluorouridine-3'-phosphate
  modified_base 12: mod_base = OTHER; note = 2'-O-methyluridine-3'-phosphate
  modified_base 13: mod_base = OTHER; note = 2'-deoxy-2'-fluoroguanosine-3'-phosphate
  modified_base 14: mod_base = OTHER; note = 2'-O-methylcytidine-3'-phosphate
  modified_base 15: mod_base = OTHER; note = 2'-deoxy-2'-fluorouridine-3'-phosphate
  modified_base 16: mod_base = OTHER; note = 2'-O-methylcytidine-3'-phosphate
  modified_base 17: mod_base = OTHER; note = 2'-deoxy-2'-fluorouridine-3'-phosphate
  modified_base 18: mod_base = OTHER; note = 2'-O-methyladenosine-3'-phosphate
  modified_base 19: mod_base = OTHER; note = 2'-deoxy-2'-fluorouridine-3'-phosphorothioate
  modified_base 20: mod_base = OTHER; note = 2'-O-methyladenosine-3'-phosphorothioate
  modified_base 21: mod_base = OTHER; note = 2'-deoxy-2'-fluoroadenosine
aacagtgttcttgctctataa

SEQ ID NO: 112 - RNA, 22 nt, synthetic construct
  source 1..22: mol_type = other RNA
  modified_base 1: mod_base = OTHER; note = 2'-O-methyladenosine-3'-phosphorothioate
  modified_base 2: mod_base = OTHER; note = 2'-deoxy-2'-fluoroadenosine-3'-phosphorothioate
  modified_base 3: mod_base = OTHER; note = 2'-O-methyladenosine-3'-phosphate
  modified_base 4: mod_base = OTHER; note = 2'-deoxy-2'-fluorocytidine-3'-phosphate
  modified_base 5: mod_base = OTHER; note = 2'-O-methyladenosine-3'-phosphate
  modified_base 6: mod_base = OTHER; note = 2'-deoxy-2'-fluoroguanosine-3'-phosphate
  modified_base 7: mod_base = OTHER; note = 2'-O-methyluridine-3'-phosphate
  modified_base 8: mod_base = OTHER; note = 2'-deoxy-2'-fluoroguanosine-3'-phosphate
  modified_base 9: mod_base = OTHER; note = 2'-O-methyluridine-3'-phosphate
  modified_base 10: mod_base = OTHER; note = 2'-deoxy-2'-fluorouridine-3'-phosphate
  modified_base 11: mod_base = OTHER; note = 2'-deoxy-2'-fluorocytidine-3'-phosphate
  modified_base 12: mod_base = OTHER; note = 2'-deoxy-2'-fluorouridine-3'-phosphate
  modified_base 13: mod_base = OTHER; note = 2'-O-methyluridine-3'-phosphate
  modified_base 14: mod_base = OTHER; note = 2'-deoxy-2'-fluoroguanosine-3'-phosphate
  modified_base 15: mod_base = OTHER; note = 2'-O-methylcytidine-3'-phosphate
  modified_base 16: mod_base = OTHER; note = 2'-deoxy-2'-fluorouridine-3'-phosphate
  modified_base 17: mod_base = OTHER; note = 2'-O-methylcytidine-3'-phosphate
  modified_base 18: mod_base = OTHER; note = 2'-deoxy-2'-fluorouridine-3'-phosphate
  modified_base 19: mod_base = OTHER; note = 2'-O-methyladenosine-3'-phosphate
  modified_base 20: mod_base = OTHER; note = 2'-deoxy-2'-fluorouridine-3'-phosphorothioate
  modified_base 21: mod_base = OTHER; note = 2'-O-methyladenosine-3'-phosphorothioate
  modified_base 22: mod_base = OTHER; note = 2'-deoxy-2'-fluoroadenosine
aaacagtgttcttgctctataa

SEQ ID NO: 113 - RNA, 22 nt, synthetic construct
  source 1..22: mol_type = other RNA
  modified_base 1: mod_base = OTHER; note = 2'-O-methyladenosine-3'-phosphorothioate
  modified_base 2: mod_base = OTHER; note = 2'-deoxy-2'-fluoroadenosine-3'-phosphorothioate
  modified_base 3: mod_base = OTHER; note = 2'-O-methyladenosine-3'-phosphate
  modified_base 4: mod_base = OTHER; note = 2'-deoxy-2'-fluorocytidine-3'-phosphate
  modified_base 5: mod_base = OTHER; note = 2'-O-methyladenosine-3'-phosphate
  modified_base 6: mod_base = OTHER; note = 2'-deoxy-2'-fluoroguanosine-3'-phosphate
  modified_base 7: mod_base = OTHER; note = 2'-O-methyluridine-3'-phosphate
  modified_base 8: mod_base = OTHER; note = 2'-deoxy-2'-fluoroguanosine-3'-phosphate
  modified_base 9: mod_base = OTHER; note = 2'-O-methyluridine-3'-phosphate
  modified_base 10: mod_base = OTHER; note = 2'-deoxy-2'-fluorouridine-3'-phosphate
  modified_base 11: mod_base = OTHER; note = 2'-deoxy-2'-fluorocytidine-3'-phosphate
  modified_base 12: mod_base = OTHER; note = 2'-deoxy-2'-fluorouridine-3'-phosphate
  modified_base 13: mod_base = OTHER; note = 2'-O-methyluridine-3'-phosphate
  modified_base 14: mod_base = OTHER; note = 2'-deoxy-2'-fluoroguanosine-3'-phosphate
  modified_base 15: mod_base = OTHER; note = 2'-O-methylcytidine-3'-phosphate
  modified_base 16: mod_base = OTHER; note = 2'-deoxy-2'-fluorouridine-3'-phosphate
  modified_base 17: mod_base = OTHER; note = 2'-O-methylcytidine-3'-phosphate
  modified_base 18: mod_base = OTHER; note = 2'-deoxy-2'-fluorouridine-3'-phosphate
  modified_base 19: mod_base = OTHER; note = 2'-O-methyladenosine-3'-phosphate
  modified_base 20: mod_base = OTHER; note = 2'-deoxy-2'-fluorouridine-3'-phosphorothioate
  modified_base 21: mod_base = OTHER; note = 2'-O-methyladenosine-3'-phosphorothioate
  modified_base 22: mod_base = OTHER; note = 2'-deoxy-2'-fluoroadenosine
aaacagtgttcttgctctataa

SEQ ID NO: 114 - RNA, 21 nt, synthetic construct
  source 1..21: mol_type = other RNA
  modified_base 1: mod_base = OTHER; note = 2'-deoxy-2'-fluoroadenosine-3'-phosphorothioate
  modified_base 2: mod_base = OTHER; note = 2'-O-methyladenosine-3'-phosphorothioate
  modified_base 3: mod_base = OTHER; note = 2'-deoxy-2'-fluorocytidine-3'-phosphate
  modified_base 4: mod_base = OTHER; note = 2'-O-methyladenosine-3'-phosphate
  modified_base 5: mod_base = OTHER; note = 2'-deoxy-2'-fluoroguanosine-3'-phosphate
  modified_base 6: mod_base = OTHER; note = 2'-O-methyluridine-3'-phosphate
  modified_base 7: mod_base = OTHER; note = 2'-deoxy-2'-fluoroguanosine-3'-phosphate
  modified_base 8: mod_base = OTHER; note = 2'-O-methyluridine-3'-phosphate
  modified_base 9: mod_base = OTHER; note = 2'-deoxy-2'-fluorouridine-3'-phosphate
  modified_base 10: mod_base = OTHER; note = 2'-deoxy-2'-fluorocytidine-3'-phosphate
  modified_base 11: mod_base = OTHER; note = 2'-deoxy-2'-fluorouridine-3'-phosphate
  modified_base 12: mod_base = OTHER; note = 2'-O-methyluridine-3'-phosphate
  modified_base 13: mod_base = OTHER; note = 2'-deoxy-2'-fluoroguanosine-3'-phosphate
  modified_base 14: mod_base = OTHER; note = 2'-O-methylcytidine-3'-phosphate
  modified_base 15: mod_base = OTHER; note = 2'-deoxy-2'-fluorouridine-3'-phosphate
  modified_base 16: mod_base = OTHER; note = 2'-O-methylcytidine-3'-phosphate
  modified_base 17: mod_base = OTHER; note = 2'-deoxy-2'-fluorouridine-3'-phosphate
  modified_base 18: mod_base = OTHER; note = 2'-O-methyladenosine-3'-phosphate
  modified_base 19: mod_base = OTHER; note = 2'-deoxy-2'-fluorouridine-3'-phosphorothioate
  modified_base 20: mod_base = OTHER; note = 2'-O-methyladenosine-3'-phosphorothioate
  modified_base 21: mod_base = OTHER; note = 2'-deoxy-2'-fluoroadenosine
aacagtgttcttgctctataa

SEQ ID NO: 115 - RNA, 21 nt, synthetic construct
  source 1..21: mol_type = other RNA
  modified_base 1: mod_base = OTHER; note = 2'-deoxy-2'-fluoroadenosine-3'-phosphorothioate
  modified_base 2: mod_base = OTHER; note = 2'-O-methyladenosine-3'-phosphorothioate
  modified_base 3: mod_base = OTHER; note = 2'-deoxy-2'-fluorocytidine-3'-phosphate
  modified_base 4: mod_base = OTHER; note = 2'-O-methyladenosine-3'-phosphate
  modified_base 5: mod_base = OTHER; note = 2'-deoxy-2'-fluoroguanosine-3'-phosphate
  modified_base 6: mod_base = OTHER; note = 2'-O-methyluridine-3'-phosphate
  modified_base 7: mod_base = OTHER; note = 2'-deoxy-2'-fluoroguanosine-3'-phosphate
  modified_base 8: mod_base = OTHER; note = 2'-O-methyluridine-3'-phosphate
  modified_base 9: mod_base = OTHER; note = 2'-deoxy-2'-fluorouridine-3'-phosphate
  modified_base 10: mod_base = OTHER; note = 2'-deoxy-2'-fluorocytidine-3'-phosphate
  modified_base 11: mod_base = OTHER; note = 2'-deoxy-2'-fluorouridine-3'-phosphate
  modified_base 12: mod_base = OTHER; note = 2'-O-methyluridine-3'-phosphate
  modified_base 13: mod_base = OTHER; note = 2'-deoxy-2'-fluoroguanosine-3'-phosphate
  modified_base 14: mod_base = OTHER; note = 2'-O-methylcytidine-3'-phosphate
  modified_base 15: mod_base = OTHER; note = 2'-deoxy-2'-fluorouridine-3'-phosphate
  modified_base 16: mod_base = OTHER; note = 2'-O-methylcytidine-3'-phosphate
  modified_base 17: mod_base = OTHER; note = 2'-deoxy-2'-fluorouridine-3'-phosphate
  modified_base 18: mod_base = OTHER; note = 2'-O-methyladenosine-3'-phosphate
  modified_base 19: mod_base = OTHER; note = 2'-deoxy-2'-fluorouridine-3'-phosphorothioate
  modified_base 20: mod_base = OTHER; note = 2'-O-methyladenosine-3'-phosphorothioate
  modified_base 21: mod_base = OTHER; note = 2'-deoxy-2'-fluoroadenosine
aacagtgttcttgctctataa

SEQ ID NO: 116 - RNA, 21 nt, synthetic construct
  source 1..21: mol_type = other RNA
  modified_base 1: mod_base = OTHER; note = 2'-deoxy-2'-fluoroadenosine-3'-phosphorothioate
  modified_base 2: mod_base = OTHER; note = 2'-O-methyladenosine-3'-phosphorothioate
  modified_base 3: mod_base = OTHER; note = 2'-deoxy-2'-fluorocytidine-3'-phosphate
  modified_base 4: mod_base = OTHER; note = 2'-O-methyladenosine-3'-phosphate
  modified_base 5: mod_base = OTHER; note = 2'-deoxy-2'-fluoroguanosine-3'-phosphate
  modified_base 6: mod_base = OTHER; note = 2'-O-methyluridine-3'-phosphate
  modified_base 7: mod_base = OTHER; note = 2'-deoxy-2'-fluoroguanosine-3'-phosphate
  modified_base 8: mod_base = OTHER; note = 2'-O-methyluridine-3'-phosphate
  modified_base 9: mod_base = OTHER; note = 2'-deoxy-2'-fluorouridine-3'-phosphate
  modified_base 10: mod_base = OTHER; note = 2'-deoxy-2'-fluorocytidine-3'-phosphate
  modified_base 11: mod_base = OTHER; note = 2'-deoxy-2'-fluorouridine-3'-phosphate
  modified_base 12: mod_base = OTHER; note = 2'-O-methyluridine-3'-phosphate
  modified_base 13: mod_base = OTHER; note = 2'-deoxy-2'-fluoroguanosine-3'-phosphate
  modified_base 14: mod_base = OTHER; note = 2'-O-methylcytidine-3'-phosphate
  modified_base 15: mod_base = OTHER; note = 2'-deoxy-2'-fluorouridine-3'-phosphate
  modified_base 16: mod_base = OTHER; note = 2'-O-methylcytidine-3'-phosphate
  modified_base 17: mod_base = OTHER; note = 2'-deoxy-2'-fluorouridine-3'-phosphate
  modified_base 18: mod_base = OTHER; note = 2'-O-methyladenosine-3'-phosphate
  modified_base 19: mod_base = OTHER; note = 2'-deoxy-2'-fluorouridine-3'-phosphorothioate
  modified_base 20: mod_base = OTHER; note = 2'-O-methyladenosine-3'-phosphorothioate
  modified_base 21: mod_base = OTHER; note = 2'-deoxy-2'-fluoroadenosine
aacagtgttcttgctctataa

SEQ ID NO: 117 - RNA, 21 nt, synthetic construct
  source 1..21: mol_type = other RNA
  modified_base 1: mod_base = OTHER; note = 2'-deoxy-2'-fluoroadenosine-3'-phosphorothioate
  modified_base 2: mod_base = OTHER; note = 2'-O-methyladenosine-3'-phosphorothioate
  modified_base 3: mod_base = OTHER; note = 2'-deoxy-2'-fluorocytidine-3'-phosphate
  modified_base 4: mod_base = OTHER; note = 2'-O-methyladenosine-3'-phosphate
  modified_base 5: mod_base = OTHER; note = 2'-deoxy-2'-fluoroguanosine-3'-phosphate
  modified_base 6: mod_base = OTHER; note = 2'-O-methyluridine-3'-phosphate
  modified_base 7: mod_base = OTHER; note = 2'-deoxy-2'-fluoroguanosine-3'-phosphate
  modified_base 8: mod_base = OTHER; note = 2'-O-methyluridine-3'-phosphate
  modified_base 9: mod_base = OTHER; note = 2'-deoxy-2'-fluorouridine-3'-phosphate
  modified_base 10: mod_base = OTHER; note = 2'-deoxy-2'-fluorocytidine-3'-phosphate
  modified_base 11: mod_base = OTHER; note = 2'-deoxy-2'-fluorouridine-3'-phosphate
  modified_base 12: mod_base = OTHER; note = 2'-O-methyluridine-3'-phosphate
  modified_base 13: mod_base = OTHER; note = 2'-deoxy-2'-fluoroguanosine-3'-phosphate
  modified_base 14: mod_base = OTHER; note = 2'-O-methylcytidine-3'-phosphate
  modified_base 15: mod_base = OTHER; note = 2'-deoxy-2'-fluorouridine-3'-phosphate
  modified_base 16: mod_base = OTHER; note = 2'-O-methylcytidine-3'-phosphate
  modified_base 17: mod_base = OTHER; note = 2'-deoxy-2'-fluorouridine-3'-phosphate
  modified_base 18: mod_base = OTHER; note = 2'-O-methyladenosine-3'-phosphate
  modified_base 19: mod_base = OTHER; note = 2'-deoxy-2'-fluorouridine-3'-phosphorothioate
  modified_base 20: mod_base = OTHER; note = 2'-O-methyladenosine-3'-phosphorothioate
  modified_base 21: mod_base = OTHER; note = 2'-deoxy-2'-fluoroadenosine
aacagtgttcttgctctataa

SEQ ID NO: 118 - RNA, 21 nt, synthetic construct
  source 1..21: mol_type = other RNA
  modified_base 1: mod_base = OTHER; note = 2'-deoxy-2'-fluorouridine-3'-phosphorothioate
  modified_base 2: mod_base = OTHER; note = 2'-O-methylguanosine-3'-phosphorothioate
  modified_base 3: mod_base = OTHER; note = 2'-deoxy-2'-fluoroadenosine-3'-phosphate
  modified_base 4: mod_base = OTHER; note = 2'-O-methylcytidine-3'-phosphate
  modified_base 5: mod_base = OTHER; note = 2'-deoxy-2'-fluoroadenosine-3'-phosphate
  modified_base 6: mod_base = OTHER; note = 2'-O-methyladenosine-3'-phosphate
  modified_base 7: mod_base = OTHER; note = 2'-deoxy-2'-fluoroadenosine-3'-phosphate
  modified_base 8: mod_base = OTHER; note = 2'-O-methyladenosine-3'-phosphate
  modified_base 9: mod_base = OTHER; note = 2'-deoxy-2'-fluorouridine-3'-phosphate
  modified_base 10: mod_base = OTHER; note = 2'-deoxy-2'-fluoroadenosine-3'-phosphate
  modified_base 11: mod_base = OTHER; note = 2'-deoxy-2'-fluoroadenosine-3'-phosphate
  modified_base 12: mod_base = OTHER; note = 2'-O-methylcytidine-3'-phosphate
  modified_base 13: mod_base = OTHER; note = 2'-deoxy-2'-fluorouridine-3'-phosphate
  modified_base 14: mod_base = OTHER; note = 2'-O-methylcytidine-3'-phosphate
  modified_base 15: mod_base = OTHER; note = 2'-deoxy-2'-fluoroadenosine-3'-phosphate
  modified_base 16: mod_base = OTHER; note = 2'-O-methylcytidine-3'-phosphate
  modified_base 17: mod_base = OTHER; note = 2'-deoxy-2'-fluorouridine-3'-phosphate
  modified_base 18: mod_base = OTHER; note = 2'-O-methyladenosine-3'-phosphate
  modified_base 19: mod_base = OTHER; note = 2'-deoxy-2'-fluorouridine-3'-phosphate
  modified_base 20: mod_base = OTHER; note = 2'-O-methyladenosine-3'-phosphate
  modified_base 21: mod_base = OTHER; note = 2'-deoxy-2'-fluoroadenosine-3'-phosphate ((2S,4R)-1-[29-[[2-(acetylamino)-2-deoxy-beta-D-galactopyra nosyl]oxy]-14,14-bis[[3-[[3-[[5-[[2-(acetylamino)-2-deoxy-b eta-D-galactopyranosyl]oxy]-1-oxopentyl]amino]propyl]amino] -3-oxopropoxy]methyl]-1,12,19,25-tetraoxo-16-oxa-13,20,24-t riazanonacos-1-yl]-4-hydroxy-2-pyrrolidinyl)methyl ester
tgacaaaataactcactataa

SEQ ID NO: 119 - RNA, 21 nt, synthetic construct
  source 1..21: mol_type = other RNA
  modified_base 1: mod_base = OTHER; note = 2'-deoxy-2'-fluorouridine-3'-phosphorothioate
  modified_base 2: mod_base = OTHER; note = 2'-O-methylguanosine-3'-phosphorothioate
  modified_base 3: mod_base = OTHER; note = 2'-deoxy-2'-fluoroadenosine-3'-phosphate
  modified_base 4: mod_base = OTHER; note = 2'-O-methylcytidine-3'-phosphate
  modified_base 5: mod_base = OTHER; note = 2'-deoxy-2'-fluoroadenosine-3'-phosphate
  modified_base 6: mod_base = OTHER; note = 2'-O-methyladenosine-3'-phosphate
  modified_base 7: mod_base = OTHER; note = 2'-deoxy-2'-fluoroadenosine-3'-phosphate
  modified_base 8: mod_base = OTHER; note = 2'-O-methyladenosine-3'-phosphate
  modified_base 9: mod_base = OTHER; note = 2'-deoxy-2'-fluorouridine-3'-phosphate
  modified_base 10: mod_base = OTHER; note = 2'-deoxy-2'-fluoroadenosine-3'-phosphate
  modified_base 11: mod_base = OTHER; note = 2'-deoxy-2'-fluoroadenosine-3'-phosphate
  modified_base 12: mod_base = OTHER; note = 2'-O-methylcytidine-3'-phosphate
  modified_base 13: mod_base = OTHER; note = 2'-deoxy-2'-fluorouridine-3'-phosphate
  modified_base 14: mod_base = OTHER; note = 2'-O-methylcytidine-3'-phosphate
  modified_base 15: mod_base = OTHER; note = 2'-deoxy-2'-fluoroadenosine-3'-phosphate
  modified_base 16: mod_base = OTHER; note = 2'-O-methylcytidine-3'-phosphate
  modified_base 17: mod_base = OTHER; note = 2'-deoxy-2'-fluorouridine-3'-phosphate
  modified_base 18: mod_base = OTHER; note = 2'-O-methyladenosine-3'-phosphate
  modified_base 19: mod_base = OTHER; note = 2'-deoxy-2'-fluorouridine-3'-phosphorothioate
  modified_base 20: mod_base = OTHER; note = 2'-O-methyladenosine-3'-phosphorothioate
  modified_base 21: mod_base = OTHER; note = 2'-deoxy-2'-fluoroadenosine
tgacaaaataactcactataa

SEQ ID NO: 120 - RNA, 21 nt, synthetic construct
  source 1..21: mol_type = other RNA
  modified_base 1: mod_base = OTHER; note = 2'-deoxy-2'-fluorouridine-3'-phosphorothioate
  modified_base 2: mod_base = OTHER; note = 2'-O-methylguanosine-3'-phosphorothioate
  modified_base 3: mod_base = OTHER; note = 2'-deoxy-2'-fluoroadenosine-3'-phosphate
  modified_base 4: mod_base = OTHER; note = 2'-O-methylcytidine-3'-phosphate
  modified_base 5: mod_base = OTHER; note = 2'-deoxy-2'-fluoroadenosine-3'-phosphate
  modified_base 6: mod_base = OTHER; note = 2'-O-methyladenosine-3'-phosphate
  modified_base 7: mod_base = OTHER; note = 2'-deoxy-2'-fluoroadenosine-3'-phosphate
  modified_base 8: mod_base = OTHER; note = 2'-O-methyladenosine-3'-phosphate
  modified_base 9: mod_base = OTHER; note = 2'-deoxy-2'-fluorouridine-3'-phosphate
  modified_base 10: mod_base = OTHER; note = 2'-deoxy-2'-fluoroadenosine-3'-phosphate
  modified_base 11: mod_base = OTHER; note = 2'-deoxy-2'-fluoroadenosine-3'-phosphate
  modified_base 12: mod_base = OTHER; note = 2'-O-methylcytidine-3'-phosphate
  modified_base 13: mod_base = OTHER; note = 2'-deoxy-2'-fluorouridine-3'-phosphate
  modified_base 14: mod_base = OTHER; note = 2'-O-methylcytidine-3'-phosphate
  modified_base 15: mod_base = OTHER; note = 2'-deoxy-2'-fluoroadenosine-3'-phosphate
  modified_base 16: mod_base = OTHER; note = 2'-O-methylcytidine-3'-phosphate
  modified_base 17: mod_base = OTHER; note = 2'-deoxy-2'-fluorouridine-3'-phosphate
  modified_base 18: mod_base = OTHER; note = 2'-O-methyladenosine-3'-phosphate
  modified_base 19: mod_base = OTHER; note = 2'-deoxy-2'-fluorouridine-3'-phosphorothioate
  modified_base 20: mod_base = OTHER; note = 2'-O-methyladenosine-3'-phosphorothioate
  modified_base 21: mod_base = OTHER; note = 2'-deoxy-2'-fluoroadenosine
tgacaaaataactcactataa

SEQ ID NO: 121 - RNA, 21 nt, synthetic construct
  source 1..21: mol_type = other RNA
  modified_base 1: mod_base = OTHER; note = 2'-O-methylguanosine-3'-phosphorothioate
  modified_base 2: mod_base = OTHER; note = 2'-O-methyladenosine-3'-phosphorothioate
  modified_base 3: mod_base = OTHER; note = 2'-O-methyladenosine-3'-phosphate
  modified_base 4: mod_base = OTHER; note = 2'-O-methyladenosine-3'-phosphate
  modified_base 5: mod_base = OTHER; note = 2'-O-methylcytidine-3'-phosphate
  modified_base 6: mod_base = OTHER; note = 2'-O-methyluridine-3'-phosphate
  modified_base 7: mod_base = OTHER; note = 2'-deoxy-2'-fluorocytidine-3'-phosphate
  modified_base 8: mod_base = OTHER; note = 2'-O-methyladenosine-3'-phosphate
  modified_base 9: mod_base = OTHER; note = 2'-deoxy-2'-fluoroadenosine-3'-phosphate
  modified_base 10: mod_base = OTHER; note = 2'-deoxy-2'-fluorouridine-3'-phosphate
  modified_base 11: mod_base = OTHER; note = 2'-deoxy-2'-fluoroadenosine-3'-phosphate
  modified_base 12: mod_base = OTHER; note = 2'-O-methyladenosine-3'-phosphate
  modified_base 13: mod_base = OTHER; note = 2'-O-methyladenosine-3'-phosphate
  modified_base 14: mod_base = OTHER; note = 2'-O-methylguanosine-3'-phosphate
  modified_base 15: mod_base = OTHER; note = 2'-O-methyluridine-3'-phosphate
  modified_base 16: mod_base = OTHER; note = 2'-O-methylguanosine-3'-phosphate
  modified_base 17: mod_base = OTHER; note = 2'-O-methylcytidine-3'-phosphate
  modified_base 18: mod_base = OTHER; note = 2'-O-methyluridine-3'-phosphate
  modified_base 19: mod_base = OTHER; note = 2'-O-methyluridine-3'-phosphorothioate
  modified_base 20: mod_base = OTHER; note = 2'-O-methyluridine-3'-phosphorothioate
  modified_base 21: mod_base = OTHER; note = 2'-O-methyladenosine
gaaactcaataaagtgcttta

SEQ ID NO: 122 - RNA, 21 nt, synthetic construct
  source 1..21: mol_type = other RNA
  modified_base 1: mod_base = OTHER; note = 2'-O-methylguanosine-3'-phosphorothioate
  modified_base 2: mod_base = OTHER; note = 2'-O-methyladenosine-3'-phosphorothioate
  modified_base 3: mod_base = OTHER; note = 2'-O-methyladenosine-3'-phosphate
  modified_base 4: mod_base = OTHER; note = 2'-O-methyladenosine-3'-phosphate
  modified_base 5: mod_base = OTHER; note = 2'-O-methylcytidine-3'-phosphate
  modified_base 6: mod_base = OTHER; note = 2'-O-methyluridine-3'-phosphate
  modified_base 7: mod_base = OTHER; note = 2'-deoxy-2'-fluorocytidine-3'-phosphate
  modified_base 8: mod_base = OTHER; note = 2'-O-methyladenosine-3'-phosphate
  modified_base 9: mod_base = OTHER; note = 2'-deoxy-2'-fluoroadenosine-3'-phosphate
  modified_base 10: mod_base = OTHER; note = 2'-deoxy-2'-fluorouridine-3'-phosphate
  modified_base 11: mod_base = OTHER; note = 2'-deoxy-2'-fluoroadenosine-3'-phosphate
  modified_base 12: mod_base = OTHER; note = 2'-O-methyladenosine-3'-phosphate
  modified_base 13: mod_base = OTHER; note = 2'-O-methyladenosine-3'-phosphate
  modified_base 14: mod_base = OTHER; note = 2'-O-methylguanosine-3'-phosphate
  modified_base 15: mod_base = OTHER; note = 2'-O-methyluridine-3'-phosphate
  modified_base 16: mod_base = OTHER; note = 2'-O-methylguanosine-3'-phosphate
  modified_base 17: mod_base = OTHER; note = 2'-O-methylcytidine-3'-phosphate
  modified_base 18: mod_base = OTHER; note = 2'-O-methyluridine-3'-phosphate
  modified_base 19: mod_base = OTHER; note = 2'-O-methyluridine-3'-phosphorothioate
  modified_base 20: mod_base = OTHER; note = 2'-O-methyluridine-3'-phosphorothioate
  modified_base 21: mod_base = OTHER; note = 2'-O-methyladenosine
gaaactcaataaagtgcttta

SEQ ID NO: 123 - RNA, 21 nt, synthetic construct
  source 1..21: mol_type = other RNA
  modified_base 1: mod_base = OTHER; note = 2'-O-methylguanosine-3'-phosphorothioate
  modified_base 2: mod_base = OTHER; note = 2'-O-methyladenosine-3'-phosphorothioate
  modified_base 3: mod_base = OTHER; note = 2'-O-methyladenosine-3'-phosphate
  modified_base 4: mod_base = OTHER; note = 2'-O-methyladenosine-3'-phosphate
  modified_base 5: mod_base = OTHER; note = 2'-O-methylcytidine-3'-phosphate
  modified_base 6: mod_base = OTHER; note = 2'-O-methyluridine-3'-phosphate
  modified_base 7: mod_base = OTHER; note = 2'-deoxy-2'-fluorocytidine-3'-phosphate
  modified_base 8: mod_base = OTHER; note = 2'-O-methyladenosine-3'-phosphate
  modified_base 9: mod_base = OTHER; note = 2'-deoxy-2'-fluoroadenosine-3'-phosphate
  modified_base 10: mod_base = OTHER; note = 2'-deoxy-2'-fluorouridine-3'-phosphate
  modified_base 11: mod_base = OTHER; note = 2'-deoxy-2'-fluoroadenosine-3'-phosphate
  modified_base 12: mod_base = OTHER; note = 2'-O-methyladenosine-3'-phosphate
  modified_base 13: mod_base = OTHER; note = 2'-O-methyladenosine-3'-phosphate
  modified_base 14: mod_base = OTHER; note = 2'-O-methylguanosine-3'-phosphate
  modified_base 15: mod_base = OTHER; note = 2'-O-methyluridine-3'-phosphate
  modified_base 16: mod_base = OTHER; note = 2'-O-methylguanosine-3'-phosphate
  modified_base 17: mod_base = OTHER; note = 2'-O-methylcytidine-3'-phosphate
  modified_base 18: mod_base = OTHER; note = 2'-O-methyluridine-3'-phosphate
  modified_base 19: mod_base = OTHER; note = 2'-O-methyluridine-3'-phosphate
  modified_base 20: mod_base = OTHER; note = 2'-O-methyluridine-3'-phosphate
  modified_base 21: mod_base = OTHER; note = 2'-O-methyladenosine-3'-phosphate ((2S,4R)-1-[29-[[2-(acetylamino)-2-deoxy-beta-D-galactopyra nosyl]oxy]-14,14-bis[[3-[[3-[[5-[[2-(acetylamino)-2-deoxy-b eta-D-galactopyranosyl]oxy]-1-oxopentyl]amino]propyl]amino] -3-oxopropoxy]methyl]-1,12,19,25-tetraoxo-16-oxa-13,20,24-t riazanonacos-1-yl]-4-hydroxy-2-pyrrolidinyl)methyl ester
gaaactcaataaagtgcttta

SEQ ID NO: 124 - RNA, 23 nt, synthetic construct
  source 1..23: mol_type = other RNA
  modified_base 1: mod_base = OTHER; note = 2'-O-methyluridine-3'-phosphorothioate
  modified_base 2: mod_base = OTHER; note = 2'-deoxy-2'-fluorouridine-3'-phosphorothioate
  modified_base 3: mod_base = OTHER; note = 2'-O-methyladenosine-3'-phosphate
  modified_base 4: mod_base = OTHER; note = 2'-deoxy-2'-fluorouridine-3'-phosphate
  modified_base 5: mod_base = OTHER; note = 2'-O-methyladenosine-3'-phosphate
  modified_base 6: mod_base = OTHER; note = 2'-deoxy-2'-fluoroguanosine-3'-phosphate
  modified_base 7: mod_base = OTHER; note = 2'-O-methyladenosine-3'-phosphate
  modified_base 8: mod_base = OTHER; note = 2'-deoxy-2'-fluoroguanosine-3'-phosphate
  modified_base 9: mod_base = OTHER; note = 2'-O-methylcytidine-3'-phosphate
  modified_base 10: mod_base = OTHER; note = 2'-deoxy-2'-fluoroadenosine-3'-phosphate
  modified_base 11: mod_base = OTHER; note = 2'-O-methyladenosine-3'-phosphate
  modified_base 12: mod_base = OTHER; note = 2'-O-methylguanosine-3'-phosphate
  modified_base 13: mod_base = OTHER; note = 2'-O-methyladenosine-3'-phosphate
  modified_base 14: mod_base = OTHER; note = 2'-deoxy-2'-fluoroadenosine-3'-phosphate
  modified_base 15: mod_base = OTHER; note = 2'-O-methylcytidine-3'-phosphate
  modified_base 16: mod_base = OTHER; note = 2'-deoxy-2'-fluoroadenosine-3'-phosphate
  modified_base 17: mod_base = OTHER; note = 2'-O-methylcytidine-3'-phosphate
  modified_base 18: mod_base = OTHER; note = 2'-deoxy-2'-fluorouridine-3'-phosphate
  modified_base 19: mod_base = OTHER; note = 2'-O-methylguanosine-3'-phosphate
  modified_base 20: mod_base = OTHER; note = 2'-deoxy-2'-fluorouridine-3'-phosphate
  modified_base 21: mod_base = OTHER; note = 2'-O-methyluridine-3'-phosphorothioate
  modified_base 22: mod_base = OTHER; note = 2'-O-methyluridine-3'-phosphorothioate
  modified_base 23: mod_base = OTHER; note = 2'-O-methyluridine
ttatagagcaagaacactgtttt

SEQ ID NO: 125 - RNA, 23 nt, synthetic construct
  source 1..23: mol_type = other RNA
  modified_base 1: mod_base = OTHER; note = 2'-O-methyluridine-3'-phosphorothioate
  modified_base 2: mod_base = OTHER; note = 2'-deoxy-2'-fluorouridine-3'-phosphorothioate
  modified_base 3: mod_base = OTHER; note = 2'-O-methyladenosine-3'-phosphate
  modified_base 4: mod_base = OTHER; note = 2'-deoxy-2'-fluorouridine-3'-phosphate
  modified_base 5: mod_base = OTHER; note = 2'-O-methyladenosine-3'-phosphate
  modified_base 6: mod_base = OTHER; note = 2'-deoxy-2'-fluoroguanosine-3'-phosphate
  modified_base 7: mod_base = OTHER; note = 2'-O-methyladenosine-3'-phosphate
  modified_base 8: mod_base = OTHER; note = 2'-deoxy-2'-fluoroguanosine-3'-phosphate
  modified_base 9: mod_base = OTHER; note = 2'-O-methylcytidine-3'-phosphate
  modified_base 10: mod_base = OTHER; note = 2'-deoxy-2'-fluoroadenosine-3'-phosphate
  modified_base 11: mod_base = OTHER; note = 2'-O-methyladenosine-3'-phosphate
  modified_base 12: mod_base = OTHER; note = 2'-O-methylguanosine-3'-phosphate
  modified_base 13: mod_base = OTHER; note = 2'-O-methyladenosine-3'-phosphate
  modified_base 14: mod_base = OTHER; note = 2'-deoxy-2'-fluoroadenosine-3'-phosphate
  modified_base 15: mod_base = OTHER; note = 2'-O-methylcytidine-3'-phosphate
  modified_base 16: mod_base = OTHER; note = 2'-deoxy-2'-fluoroadenosine-3'-phosphate
  modified_base 17: mod_base = OTHER; note = 2'-O-methylcytidine-3'-phosphate
  modified_base 18: mod_base = OTHER; note = 2'-deoxy-2'-fluorouridine-3'-phosphate
  modified_base 19: mod_base = OTHER; note = 2'-O-methylguanosine-3'-phosphate
  modified_base 20: mod_base = OTHER; note = 2'-deoxy-2'-fluorouridine-3'-phosphate
  modified_base 21: mod_base = OTHER; note = 2'-O-methyluridine-3'-phosphorothioate
  modified_base 22: mod_base = OTHER; note = 2'-O-methyluridine-3'-phosphorothioate
  modified_base 23: mod_base = OTHER; note = 2'-O-methyluridine-3'-phosphate ((2S,4R)-1-[29-[[2-(acetylamino)-2-deoxy-beta-D-galactopyra nosyl]oxy]-14,14-bis[[3-[[3-[[5-[[2-(acetylamino)-2-deoxy-b eta-D-galactopyranosyl]oxy]-1-oxopentyl]amino]propyl]amino] -3-oxopropoxy]methyl]-1,12,19,25-tetraoxo-16-oxa-13,20,24-t riazanonacos-1-yl]-4-hydroxy-2-pyrrolidinyl)methyl ester
ttatagagcaagaacactgtttt

SEQ ID NO: 126 - RNA, 23 nt, synthetic construct
  source 1..23: mol_type = other RNA
  modified_base 1: mod_base = OTHER; note = 2'-O-methyluridine-3'-phosphorothioate
  modified_base 2: mod_base = OTHER; note = 2'-deoxy-2'-fluorouridine-3'-phosphorothioate
  modified_base 3: mod_base = OTHER; note = 2'-O-methyladenosine-3'-phosphate
  modified_base 4: mod_base = OTHER; note = 2'-deoxy-2'-fluorouridine-3'-phosphate
  modified_base 5: mod_base = OTHER; note = 2'-O-methyladenosine-3'-phosphate
  modified_base 6: mod_base = OTHER; note = 2'-deoxy-2'-fluoroguanosine-3'-phosphate
  modified_base 7: mod_base = OTHER; note = 2'-O-methyladenosine-3'-phosphate
  modified_base 8: mod_base = OTHER; note = 2'-deoxy-2'-fluoroguanosine-3'-phosphate
  modified_base 9: mod_base = OTHER; note = 2'-O-methylcytidine-3'-phosphate
  modified_base 10: mod_base = OTHER; note = 2'-deoxy-2'-fluoroadenosine-3'-phosphate
  modified_base 11: mod_base = OTHER; note = 2'-O-methyladenosine-3'-phosphate
  modified_base 12: mod_base = OTHER; note = 2'-O-methylguanosine-3'-phosphate
  modified_base 13: mod_base = OTHER; note = 2'-O-methyladenosine-3'-phosphate
  modified_base 14: mod_base = OTHER; note = 2'-deoxy-2'-fluoroadenosine-3'-phosphate
  modified_base 15: mod_base = OTHER; note = 2'-O-methylcytidine-3'-phosphate
  modified_base 16: mod_base = OTHER; note = 2'-deoxy-2'-fluoroadenosine-3'-phosphate
  modified_base 17: mod_base = OTHER; note = 2'-O-methylcytidine-3'-phosphate
  modified_base 18: mod_base = OTHER; note = 2'-deoxy-2'-fluorouridine-3'-phosphate
  modified_base 19: mod_base = OTHER; note = 2'-O-methylguanosine-3'-phosphate
  modified_base 20: mod_base = OTHER; note = 2'-deoxy-2'-fluorouridine-3'-phosphate
  modified_base 21: mod_base = OTHER; note = 2'-O-methyluridine-3'-phosphate
  modified_base 22: mod_base = OTHER; note = 2'-O-methyluridine-3'-phosphate
  modified_base 23: mod_base = OTHER; note = 2'-O-methyluridine-3'-phosphate ((2S,4R)-1-[29-[[2-(acetylamino)-2-deoxy-beta-D-galactopyra nosyl]oxy]-14,14-bis[[3-[[3-[[5-[[2-(acetylamino)-2-deoxy-b eta-D-galactopyranosyl]oxy]-1-oxopentyl]amino]propyl]amino] -3-oxopropoxy]methyl]-1,12,19,25-tetraoxo-16-oxa-13,20,24-t riazanonacos-1-yl]-4-hydroxy-2-pyrrolidinyl)methyl ester
ttatagagcaagaacactgtttt

SEQ ID NO: 127 - RNA, 23 nt, synthetic construct
  source 1..23: mol_type = other RNA
  modified_base 1: mod_base = OTHER; note = 2'-O-methyluridine-3'-phosphorothioate
  modified_base 2: mod_base = OTHER; note = 2'-deoxy-2'-fluorouridine-3'-phosphorothioate
  modified_base 3: mod_base = OTHER; note = 2'-O-methyladenosine-3'-phosphate
  modified_base 4: mod_base = OTHER; note = 2'-deoxy-2'-fluorouridine-3'-phosphate
  modified_base 5: mod_base = OTHER; note = 2'-O-methyladenosine-3'-phosphate
  modified_base 6: mod_base = OTHER; note = 2'-deoxy-2'-fluoroguanosine-3'-phosphate
  modified_base 7: mod_base = OTHER; note = 2'-O-methyladenosine-3'-phosphate
  modified_base 8: mod_base = OTHER; note = 2'-deoxy-2'-fluoroguanosine-3'-phosphate
  modified_base 9: mod_base = OTHER; note = 2'-O-methylcytidine-3'-phosphate
  modified_base 10: mod_base = OTHER; note = 2'-deoxy-2'-fluoroadenosine-3'-phosphate
  modified_base 11: mod_base = OTHER; note = 2'-O-methyladenosine-3'-phosphate
  modified_base 12: mod_base = OTHER; note = 2'-O-methylguanosine-3'-phosphate
  modified_base 13: mod_base = OTHER; note = 2'-O-methyladenosine-3'-phosphate
  modified_base 14: mod_base = OTHER; note = 2'-deoxy-2'-fluoroadenosine-3'-phosphate
  modified_base 15: mod_base = OTHER; note = 2'-O-methylcytidine-3'-phosphate
  modified_base 16: mod_base = OTHER; note = 2'-deoxy-2'-fluoroadenosine-3'-phosphate
  modified_base 17: mod_base = OTHER; note = 2'-O-methylcytidine-3'-phosphate
  modified_base 18: mod_base = OTHER; note = 2'-deoxy-2'-fluorouridine-3'-phosphate
  modified_base 19: mod_base = OTHER; note = 2'-O-methylguanosine-3'-phosphate
  modified_base 20: mod_base = OTHER; note = 2'-deoxy-2'-fluorouridine-3'-phosphate
  modified_base 21: mod_base = OTHER; note = 2'-O-methyluridine-3'-phosphorothioate
  modified_base 22: mod_base = OTHER; note = 2'-O-methyluridine-3'-phosphorothioate
  modified_base 23: mod_base = OTHER; note = 2'-O-methyluridine
ttatagagcaagaacactgtttt

SEQ ID NO: 128 - DNA, 23 bp, synthetic construct
  source 1..23: mol_type = other DNA
  modified_base 1: mod_base = OTHER; note = 2'-O-methyluridine-3'-phosphorothioate
  modified_base 2: mod_base = OTHER; note = 2'-deoxy-2'-fluorouridine-3'-phosphorothioate
  modified_base 3: mod_base = OTHER; note = 2'-O-methyladenosine-3'-phosphate
  modified_base 4: mod_base = OTHER; note = 2'-deoxy-2'-fluorouridine-3'-phosphate
  modified_base 5: mod_base = OTHER; note = 2'-O-methyladenosine-3'-phosphate
  modified_base 6: mod_base = OTHER; note = 2'-deoxy-2'-fluoroguanosine-3'-phosphate
  modified_base 7: mod_base = OTHER; note = 2'-O-methyladenosine-3'-phosphate
  modified_base 8: mod_base = OTHER; note = 2'-deoxy-2'-fluoroguanosine-3'-phosphate
  modified_base 9: mod_base = OTHER; note = 2'-O-methylcytidine-3'-phosphate
  modified_base 10: mod_base = OTHER; note = 2'-deoxy-2'-fluoroadenosine-3'-phosphate
  modified_base 11: mod_base = OTHER; note = 2'-O-methyladenosine-3'-phosphate
  modified_base 12: mod_base = OTHER; note = 2'-O-methylguanosine-3'-phosphate
  modified_base 13: mod_base = OTHER; note = 2'-O-methyladenosine-3'-phosphate
  modified_base 14: mod_base = OTHER; note = 2'-deoxy-2'-fluoroadenosine-3'-phosphate
  modified_base 15: mod_base = OTHER; note = 2'-O-methylcytidine-3'-phosphate
  modified_base 16: mod_base = OTHER; note = 2'-deoxy-2'-fluoroadenosine-3'-phosphate
  modified_base 17: mod_base = OTHER; note = 2'-O-methylcytidine-3'-phosphate
  modified_base 18: mod_base = OTHER; note = 2'-deoxy-2'-fluorouridine-3'-phosphate
  modified_base 19: mod_base = OTHER; note = 2'-O-methylguanosine-3'-phosphate
  modified_base 20: mod_base = OTHER; note = 2'-deoxy-2'-fluorouridine-3'-phosphate
  modified_base 21: mod_base = OTHER; note = 2'-O-methyluridine-3'-phosphate
  modified_base 23: mod_base = OTHER; note = 2'-deoxythymidine-3'-phosphate ((2S,4R)-1-[29-[[2-(acetylamino)-2-deoxy-beta-D-galactopyra nosyl]oxy]-14,14-bis[[3-[[3-[[5-[[2-(acetylamino)-2-deoxy-b eta-D-galactopyranosyl]oxy]-1-oxopentyl]amino]propyl]amino] -3-oxopropoxy]methyl]-1,12,19,25-tetraoxo-16-oxa-13,20,24-t riazanonacos-1-yl]-4-hydroxy-2-pyrrolidinyl)methyl ester
  misc_feature 1..21: note = RNA
  misc_feature 22..23: note = DNA
ttatagagcaagaacactgtttt

SEQ ID NO: 129 - DNA, 23 bp, synthetic construct
  source 1..23: mol_type = other DNA
  modified_base 1: mod_base = OTHER; note = 2'-O-methyluridine-3'-phosphorothioate
  modified_base 2: mod_base = OTHER; note = 2'-deoxy-2'-fluorouridine-3'-phosphorothioate
  modified_base 3: mod_base = OTHER; note = 2'-O-methyladenosine-3'-phosphate
  modified_base 4: mod_base = OTHER; note = 2'-deoxy-2'-fluorouridine-3'-phosphate
  modified_base 5: mod_base = OTHER; note = 2'-O-methyladenosine-3'-phosphate
  modified_base 6: mod_base = OTHER; note = 2'-deoxy-2'-fluoroguanosine-3'-phosphate
  modified_base 7: mod_base = OTHER; note = 2'-O-methyladenosine-3'-phosphate
  modified_base 8: mod_base = OTHER; note = 2'-deoxy-2'-fluoroguanosine-3'-phosphate
  modified_base 9: mod_base = OTHER; note = 2'-O-methylcytidine-3'-phosphate
  modified_base 10: mod_base = OTHER; note = 2'-deoxy-2'-fluoroadenosine-3'-phosphate
  modified_base 11: mod_base = OTHER; note = 2'-O-methyladenosine-3'-phosphate
  modified_base 12: mod_base = OTHER; note = 2'-O-methylguanosine-3'-phosphate
  modified_base 13: mod_base = OTHER; note = 2'-O-methyladenosine-3'-phosphate
  modified_base 14: mod_base = OTHER; note = 2'-deoxy-2'-fluoroadenosine-3'-phosphate
  modified_base 15: mod_base = OTHER; note = 2'-O-methylcytidine-3'-phosphate
  modified_base 16: mod_base = OTHER; note = 2'-deoxy-2'-fluoroadenosine-3'-phosphate
  modified_base 17: mod_base = OTHER; note = 2'-O-methylcytidine-3'-phosphate
  modified_base 18: mod_base = OTHER; note = 2'-deoxy-2'-fluorouridine-3'-phosphate
  modified_base 19: mod_base = OTHER; note = 2'-O-methylguanosine-3'-phosphate
  modified_base 20: mod_base = OTHER; note = 2'-deoxy-2'-fluorouridine-3'-phosphate
  modified_base 21: mod_base = OTHER; note = 2'-O-methyluridine-3'-phosphorothioate
  modified_base 22: mod_base = OTHER; note = 2'-deoxythymidine-3'-phosphorothioate
  modified_base 23: mod_base = OTHER; note = 2'-deoxythymidine-3'-phosphate ((2S,4R)-1-[29-[[2-(acetylamino)-2-deoxy-beta-D-galactopyra nosyl]oxy]-14,14-bis[[3-[[3-[[5-[[2-(acetylamino)-2-deoxy-b eta-D-galactopyranosyl]oxy]-1-oxopentyl]amino]propyl]amino] -3-oxopropoxy]methyl]-1,12,19,25-tetraoxo-16-oxa-13,20,24-t riazanonacos-1-yl]-4-hydroxy-2-pyrrolidinyl)methyl ester
  misc_feature 1..21: note = RNA
  misc_feature 22..23: note = DNA
ttatagagcaagaacactgtttt

SEQ ID NO: 130 - RNA, 22 nt, synthetic construct
  source 1..22: mol_type = other RNA
  modified_base 1: mod_base = OTHER; note = 2'-O-methyluridine-3'-phosphorothioate
  modified_base 2: mod_base = OTHER; note = 2'-deoxy-2'-fluorouridine-3'-phosphorothioate
  modified_base 3: mod_base = OTHER; note = 2'-O-methyladenosine-3'-phosphate
  modified_base 4: mod_base = OTHER; note = 2'-deoxy-2'-fluorouridine-3'-phosphate
  modified_base 5: mod_base = OTHER; note = 2'-O-methyladenosine-3'-phosphate
  modified_base 6: mod_base = OTHER; note = 2'-deoxy-2'-fluoroguanosine-3'-phosphate
  modified_base 7: mod_base = OTHER; note = 2'-O-methyladenosine-3'-phosphate
  modified_base 8: mod_base = OTHER; note = 2'-deoxy-2'-fluoroguanosine-3'-phosphate
  modified_base 9: mod_base = OTHER; note = 2'-O-methylcytidine-3'-phosphate
  modified_base 10: mod_base = OTHER; note = 2'-deoxy-2'-fluoroadenosine-3'-phosphate
  modified_base 11: mod_base = OTHER; note = 2'-O-methyladenosine-3'-phosphate
  modified_base 12: mod_base = OTHER; note = 2'-O-methylguanosine-3'-phosphate
  modified_base 13: mod_base = OTHER; note = 2'-O-methyladenosine-3'-phosphate
  modified_base 14: mod_base = OTHER; note = 2'-deoxy-2'-fluoroadenosine-3'-phosphate
  modified_base 15: mod_base = OTHER; note = 2'-O-methylcytidine-3'-phosphate
  modified_base 16: mod_base = OTHER; note = 2'-deoxy-2'-fluoroadenosine-3'-phosphate
  modified_base 17: mod_base = OTHER; note = 2'-O-methylcytidine-3'-phosphate
  modified_base 18: mod_base = OTHER; note = 2'-deoxy-2'-fluorouridine-3'-phosphate
  modified_base 19: mod_base = OTHER; note = 2'-O-methylguanosine-3'-phosphate
  modified_base 20: mod_base = OTHER; note = 2'-deoxy-2'-fluorouridine-3'-phosphorothioate
  modified_base 21: mod_base = OTHER; note = 2'-O-methyluridine-3'-phosphorothioate
  modified_base 22: mod_base = OTHER; note = 2'-O-methyluridine-3'-phosphate ((2S,4R)-1-[29-[[2-(acetylamino)-2-deoxy-beta-D-galactopyra nosyl]oxy]-14,14-bis[[3-[[3-[[5-[[2-(acetylamino)-2-deoxy-b eta-D-galactopyranosyl]oxy]-1-oxopentyl]amino]propyl]amino] -3-oxopropoxy]methyl]-1,12,19,25-tetraoxo-16-oxa-13,20,24-t riazanonacos-1-yl]-4-hydroxy-2-pyrrolidinyl)methyl ester
ttatagagcaagaacactgttt

SEQ ID NO: 131 - RNA, 23 nt, synthetic construct
  source 1..23: mol_type = other RNA
  modified_base 1: mod_base = OTHER; note = 2'-O-methyluridine-3'-phosphorothioate
  modified_base 2: mod_base = OTHER; note = 2'-deoxy-2'-fluorouridine-3'-phosphorothioate
  modified_base 3: mod_base = OTHER; note = 2'-O-methyladenosine-3'-phosphate
  modified_base 4: mod_base = OTHER; note = 2'-deoxy-2'-fluorouridine-3'-phosphate
  modified_base 5: mod_base = OTHER; note = 2'-O-methyladenosine-3'-phosphate
  modified_base 6: mod_base = OTHER; note = 2'-deoxy-2'-fluoroguanosine-3'-phosphate
  modified_base 7: mod_base = OTHER; note = 2'-O-methyladenosine-3'-phosphate
  modified_base 8: mod_base = OTHER; note = 2'-deoxy-2'-fluoroguanosine-3'-phosphate
  modified_base 9: mod_base = OTHER; note = 2'-O-methylcytidine-3'-phosphate
  modified_base 10: mod_base = OTHER; note = 2'-deoxy-2'-fluoroadenosine-3'-phosphate
  modified_base 11: mod_base = OTHER; note = 2'-O-methyladenosine-3'-phosphate
  modified_base 12: mod_base = OTHER; note = 2'-O-methylguanosine-3'-phosphate
  modified_base 13: mod_base = OTHER; note = 2'-O-methyladenosine-3'-phosphate
  modified_base 14: mod_base = OTHER; note = 2'-deoxy-2'-fluoroadenosine-3'-phosphate
  modified_base 15: mod_base = OTHER; note = 2'-O-methylcytidine-3'-phosphate
  modified_base 16: mod_base = OTHER; note = 2'-deoxy-2'-fluoroadenosine-3'-phosphate
  modified_base 17: mod_base = OTHER; note = 2'-O-methylcytidine-3'-phosphate
  modified_base 18: mod_base = OTHER; note = 2'-deoxy-2'-fluorouridine-3'-phosphate
  modified_base 19: mod_base = OTHER; note = 2'-O-methylguanosine-3'-phosphate
  modified_base 20: mod_base = OTHER; note = 2'-deoxy-2'-fluorouridine-3'-phosphate
  modified_base 21: mod_base = OTHER; note = 2'-O-methyluridine-3'-phosphorothioate
  modified_base 22: mod_base = OTHER; note = 2'-O-methyluridine-3'-phosphorothioate
  modified_base 23: mod_base = OTHER; note = 2'-O-methyluridine-3'-phosphate ((2S,4R)-1-[29-[[2-(acetylamino)-2-deoxy-beta-D-galactopyra nosyl]oxy]-14,14-bis[[3-[[3-[[5-[[2-(acetylamino)-2-deoxy-b eta-D-galactopyranosyl]oxy]-1-oxopentyl]amino]propyl]amino] -3-oxopropoxy]methyl]-1,12,19,25-tetraoxo-16-oxa-13,20,24-t riazanonacos-1-yl]-4-hydroxy-2-pyrrolidinyl)methyl ester
ttatagagcaagaacactgtttt

SEQ ID NO: 132 - RNA, 21 nt, synthetic construct
  source 1..21: mol_type = other RNA
  modified_base 1: mod_base = OTHER; note = 2'-O-methyluridine-3'-phosphorothioate
  modified_base 2: mod_base = OTHER; note = 2'-deoxy-2'-fluorouridine-3'-phosphorothioate
  modified_base 3: mod_base = OTHER; note = 2'-O-methyladenosine-3'-phosphate
  modified_base 4: mod_base = OTHER; note = 2'-deoxy-2'-fluorouridine-3'-phosphate
  modified_base 5: mod_base = OTHER; note = 2'-O-methyladenosine-3'-phosphate
  modified_base 6: mod_base = OTHER; note = 2'-deoxy-2'-fluoroguanosine-3'-phosphate
  modified_base 7: mod_base = OTHER; note = 2'-O-methyladenosine-3'-phosphate
  modified_base 8: mod_base = OTHER; note = 2'-deoxy-2'-fluoroguanosine-3'-phosphate
  modified_base 9: mod_base = OTHER; note = 2'-O-methylcytidine-3'-phosphate
  modified_base 10: mod_base = OTHER; note = 2'-deoxy-2'-fluoroadenosine-3'-phosphate
  modified_base 11: mod_base = OTHER; note = 2'-O-methyladenosine-3'-phosphate
  modified_base 12: mod_base = OTHER; note = 2'-O-methylguanosine-3'-phosphate
  modified_base 13: mod_base = OTHER; note = 2'-O-methyladenosine-3'-phosphate
  modified_base 14: mod_base = OTHER; note = 2'-deoxy-2'-fluoroadenosine-3'-phosphate
  modified_base 15: mod_base = OTHER; note = 2'-O-methylcytidine-3'-phosphate
  modified_base 16: mod_base = OTHER; note = 2'-deoxy-2'-fluoroadenosine-3'-phosphate
  modified_base 17: mod_base = OTHER; note = 2'-O-methylcytidine-3'-phosphate
  modified_base 18: mod_base = OTHER; note = 2'-deoxy-2'-fluorouridine-3'-phosphate
  modified_base 19: mod_base = OTHER; note = 2'-O-methylguanosine-3'-phosphorothioate
  modified_base 20: mod_base = OTHER; note = 2'-deoxy-2'-fluorouridine-3'-phosphorothioate
  modified_base 21: mod_base = OTHER; note = 2'-O-methyluridine-3'-phosphate ((2S,4R)-1-[29-[[2-(acetylamino)-2-deoxy-beta-D-galactopyra nosyl]oxy]-14,14-bis[[3-[[3-[[5-[[2-(acetylamino)-2-deoxy-b eta-D-galactopyranosyl]oxy]-1-oxopentyl]amino]propyl]amino] -3-oxopropoxy]methyl]-1,12,19,25-tetraoxo-16-oxa-13,20,24-t riazanonacos-1-yl]-4-hydroxy-2-pyrrolidinyl)methyl ester
ttatagagcaagaacactgtt

SEQ ID NO: 133 - RNA, 22 nt, synthetic construct
  source 1..22: mol_type = other RNA
  modified_base 1: mod_base = OTHER; note = 2'-O-methyluridine-3'-phosphorothioate
  modified_base 2: mod_base = OTHER; note = 2'-deoxy-2'-fluorouridine-3'-phosphorothioate
  modified_base 3: mod_base = OTHER; note = 2'-O-methyladenosine-3'-phosphate
  modified_base 4: mod_base = OTHER; note = 2'-deoxy-2'-fluorouridine-3'-phosphate
  modified_base 5: mod_base = OTHER; note = 2'-O-methyladenosine-3'-phosphate
  modified_base 6: mod_base = OTHER; note = 2'-deoxy-2'-fluoroguanosine-3'-phosphate
  modified_base 7: mod_base = OTHER; note = 2'-O-methyladenosine-3'-phosphate
  modified_base 8: mod_base = OTHER; note = 2'-deoxy-2'-fluoroguanosine-3'-phosphate
  modified_base 9: mod_base = OTHER; note = 2'-O-methylcytidine-3'-phosphate
  modified_base 10: mod_base = OTHER; note = 2'-deoxy-2'-fluoroadenosine-3'-phosphate
  modified_base 11: mod_base = OTHER; note = 2'-O-methyladenosine-3'-phosphate
  modified_base 12: mod_base = OTHER; note = 2'-O-methylguanosine-3'-phosphate
  modified_base 13: mod_base = OTHER; note = 2'-O-methyladenosine-3'-phosphate
  modified_base 14: mod_base = OTHER; note = 2'-deoxy-2'-fluoroadenosine-3'-phosphate
  modified_base 15: mod_base = OTHER; note = 2'-O-methylcytidine-3'-phosphate
  modified_base 16: mod_base = OTHER; note = 2'-deoxy-2'-fluoroadenosine-3'-phosphate
  modified_base 17: mod_base = OTHER; note = 2'-O-methylcytidine-3'-phosphate
  modified_base 18: mod_base = OTHER; note = 2'-deoxy-2'-fluorouridine-3'-phosphate
  modified_base 19: mod_base = OTHER; note = 2'-O-methylguanosine-3'-phosphate
  modified_base 20: mod_base = OTHER; note = 2'-deoxy-2'-fluorouridine-3'-phosphorothioate
  modified_base 21: mod_base = OTHER; note = 2'-O-methyluridine-3'-phosphorothioate
  modified_base 22: mod_base = OTHER; note = 2'-O-methyluridine-3'-phosphate ((2S,4R)-1-[29-[[2-(acetylamino)-2-deoxy-beta-D-galactopyra nosyl]oxy]-14,14-bis[[3-[[3-[[5-[[2-(acetylamino)-2-deoxy-b eta-D-galactopyranosyl]oxy]-1-oxopentyl]amino]propyl]amino] -3-oxopropoxy]methyl]-1,12,19,25-tetraoxo-16-oxa-13,20,24-t riazanonacos-1-yl]-4-hydroxy-2-pyrrolidinyl)methyl ester
ttatagagcaagaacactgttt

SEQ ID NO: 134 - DNA, 25 bp, synthetic construct
  source 1..25: mol_type = other DNA
  modified_base 1: mod_base = OTHER; note = 2'-O-methyluridine-3'-phosphorothioate
  modified_base 2: mod_base = OTHER; note = 2'-deoxy-2'-fluorouridine-3'-phosphorothioate
  modified_base 3: mod_base = OTHER; note = 2'-O-methyladenosine-3'-phosphate
  modified_base 4: mod_base = OTHER; note = 2'-deoxy-2'-fluorouridine-3'-phosphate
  modified_base 5: mod_base = OTHER; note = 2'-O-methyladenosine-3'-phosphate
  modified_base 6: mod_base = OTHER; note = 2'-deoxy-2'-fluoroguanosine-3'-phosphate
  modified_base 7: mod_base = OTHER; note = 2'-O-methyladenosine-3'-phosphate
  modified_base 8: mod_base = OTHER; note = 2'-deoxy-2'-fluoroguanosine-3'-phosphate
  modified_base 9: mod_base = OTHER; note = 2'-O-methylcytidine-3'-phosphate
  modified_base 10: mod_base = OTHER; note = 2'-deoxy-2'-fluoroadenosine-3'-phosphate
  modified_base 11: mod_base = OTHER; note = 2'-O-methyladenosine-3'-phosphate
  modified_base 12: mod_base = OTHER; note = 2'-O-methylguanosine-3'-phosphate
  modified_base 13: mod_base = OTHER; note = 2'-O-methyladenosine-3'-phosphate
  modified_base 14: mod_base = OTHER; note = 2'-deoxy-2'-fluoroadenosine-3'-phosphate
  modified_base 15: mod_base = OTHER; note = 2'-O-methylcytidine-3'-phosphate
  modified_base 16: mod_base = OTHER; note = 2'-deoxy-2'-fluoroadenosine-3'-phosphate
  modified_base 17: mod_base = OTHER; note = 2'-O-methylcytidine-3'-phosphate
  modified_base 18: mod_base = OTHER; note = 2'-deoxy-2'-fluorouridine-3'-phosphate
  modified_base 19: mod_base = OTHER; note = 2'-O-methylguanosine-3'-phosphate
  modified_base 20: mod_base = OTHER; note = 2'-deoxy-2'-fluorouridine-3'-phosphate
  modified_base 21: mod_base = OTHER; note = 2'-O-methyluridine-3'-phosphorothioate
  modified_base 22: mod_base = OTHER; note = 2'-O-methyluridine-3'-phosphorothioate
  modified_base 23: mod_base = OTHER; note = 2'-O-methyluridine-3'-phosphate
  modified_base 25: mod_base = OTHER; note = 2'-deoxythymidine-3'-phosphate ((2S,4R)-1-[29-[[2-(acetylamino)-2-deoxy-beta-D-galactopyra nosyl]oxy]-14,14-bis[[3-[[3-[[5-[[2-(acetylamino)-2-deoxy-b eta-D-galactopyranosyl]oxy]-1-oxopentyl]amino]propyl]amino] -3-oxopropoxy]methyl]-1,12,19,25-tetraoxo-16-oxa-13,20,24-t riazanonacos-1-yl]-4-hydroxy-2-pyrrolidinyl)methyl ester
  misc_feature 1..23: note = RNA
  misc_feature 24..25: note = DNA
ttatagagcaagaacactgtttttt

SEQ ID NO: 135 - DNA, 25 bp, synthetic construct
  source 1..25: mol_type = other DNA
  modified_base 1: mod_base = OTHER; note = 2'-O-methyluridine-3'-phosphorothioate
  modified_base 2: mod_base = OTHER; note = 2'-deoxy-2'-fluorouridine-3'-phosphorothioate
  modified_base 3: mod_base = OTHER; note = 2'-O-methyladenosine-3'-phosphate
  modified_base 4: mod_base = OTHER; note = 2'-deoxy-2'-fluorouridine-3'-phosphate
  modified_base 5: mod_base = OTHER; note = 2'-O-methyladenosine-3'-phosphate
  modified_base 6: mod_base = OTHER; note = 2'-deoxy-2'-fluoroguanosine-3'-phosphate
  modified_base 7: mod_base = OTHER; note = 2'-O-methyladenosine-3'-phosphate
  modified_base 8: mod_base = OTHER; note = 2'-deoxy-2'-fluoroguanosine-3'-phosphate
  modified_base 9: mod_base = OTHER; note = 2'-O-methylcytidine-3'-phosphate
  modified_base 10: mod_base = OTHER; note = 2'-deoxy-2'-fluoroadenosine-3'-phosphate
  modified_base 11: mod_base = OTHER; note = 2'-O-methyladenosine-3'-phosphate
  modified_base 12: mod_base = OTHER; note = 2'-O-methylguanosine-3'-phosphate
  modified_base 13: mod_base = OTHER; note = 2'-O-methyladenosine-3'-phosphate
  modified_base 14: mod_base = OTHER; note = 2'-deoxy-2'-fluoroadenosine-3'-phosphate
  modified_base 15: mod_base = OTHER; note = 2'-O-methylcytidine-3'-phosphate
  modified_base 16: mod_base = OTHER; note = 2'-deoxy-2'-fluoroadenosine-3'-phosphate
  modified_base 17: mod_base = OTHER; note = 2'-O-methylcytidine-3'-phosphate
  modified_base 18: mod_base = OTHER; note = 2'-deoxy-2'-fluorouridine-3'-phosphate
  modified_base 19: mod_base = OTHER; note = 2'-O-methylguanosine-3'-phosphate
  modified_base 20: mod_base = OTHER; note = 2'-deoxy-2'-fluorouridine-3'-phosphate
  modified_base 21: mod_base = OTHER; note = 2'-O-methyluridine-3'-phosphate
  modified_base 22: mod_base = OTHER; note = 2'-O-methyluridine-3'-phosphate
  modified_base 23: mod_base = OTHER; note = 2'-O-methyluridine-3'-phosphorothioate
  modified_base 24: mod_base = OTHER; note = 2'-deoxythymidine-3'-phosphorothioate
  modified_base 25: mod_base = OTHER; note = 2'-deoxythymidine-3'-phosphate ((2S,4R)-1-[29-[[2-(acetylamino)-2-deoxy-beta-D-galactopyra nosyl]oxy]-14,14-bis[[3-[[3-[[5-[[2-(acetylamino)-2-deoxy-b eta-D-galactopyranosyl]oxy]-1-oxopentyl]amino]propyl]amino] -3-oxopropoxy]methyl]-1,12,19,25-tetraoxo-16-oxa-13,20,24-t riazanonacos-1-yl]-4-hydroxy-2-pyrrolidinyl)methyl ester
  misc_feature 1..23: note = RNA
  misc_feature 24..25: note = DNA
ttatagagcaagaacactgtttttt

SEQ ID NO: 136 - RNA, 23 nt, synthetic construct
  source 1..23: mol_type = other RNA
  modified_base 1: mod_base = OTHER; note = 2'-O-methyluridine-3'-phosphorothioate
  modified_base 2: mod_base = OTHER; note = 2'-deoxy-2'-fluorouridine-3'-phosphorothioate
  modified_base 3: mod_base = OTHER; note = 2'-O-methyladenosine-3'-phosphate
  modified_base 4: mod_base = OTHER; note = 2'-deoxy-2'-fluorouridine-3'-phosphate
  modified_base 5: mod_base = OTHER; note = 2'-O-methyladenosine-3'-phosphate
  modified_base 6: mod_base = OTHER; note = 2'-deoxy-2'-fluoroguanosine-3'-phosphate
  modified_base 7: mod_base = OTHER; note = 2'-O-methyluridine-3'-phosphate
  modified_base 8: mod_base = OTHER; note = 2'-deoxy-2'-fluoroguanosine-3'-phosphate
  modified_base 9: mod_base = OTHER; note = 2'-O-methyladenosine-3'-phosphate
  modified_base 10: mod_base = OTHER; note = 2'-deoxy-2'-fluoroguanosine-3'-phosphate
  modified_base 11: mod_base = OTHER; note = 2'-O-methyluridine-3'-phosphate
  modified_base 12: mod_base = OTHER; note = 2'-O-methyluridine-3'-phosphate
  modified_base 13: mod_base = OTHER; note = 2'-O-methyladenosine-3'-phosphate
  modified_base 14: mod_base = OTHER; note = 2'-deoxy-2'-fluorouridine-3'-phosphate
  modified_base 15: mod_base = OTHER; note = 2'-O-methyluridine-3'-phosphate
  modified_base 16: mod_base = OTHER; note = 2'-deoxy-2'-fluorouridine-3'-phosphate
  modified_base 17: mod_base = OTHER; note = 2'-O-methyluridine-3'-phosphate
  modified_base 18: mod_base = OTHER; note = 2'-deoxy-2'-fluoroguanosine-3'-phosphate
  modified_base 19: mod_base = OTHER; note = 2'-O-methyluridine-3'-phosphate
  modified_base 20: mod_base = OTHER; note = 2'-deoxy-2'-fluorocytidine-3'-phosphate
  modified_base 21: mod_base = OTHER; note = 2'-O-methyladenosine-3'-phosphorothioate
  modified_base 22: mod_base = OTHER; note = 2'-O-methyladenosine-3'-phosphorothioate
  modified_base 23: mod_base = OTHER; note = 2'-O-methyluridine
ttatagtgagttattttgtcaat

SEQ ID NO: 137 - RNA, 23 nt, synthetic construct
  source 1..23: mol_type = other RNA
  modified_base 1: mod_base = OTHER; note = 2'-O-methyluridine-3'-phosphorothioate
  modified_base 2: mod_base = OTHER; note = 2'-deoxy-2'-fluorouridine-3'-phosphorothioate
  modified_base 3: mod_base = OTHER; note = 2'-O-methyladenosine-3'-phosphate
  modified_base 4: mod_base = OTHER; note = 2'-deoxy-2'-fluorouridine-3'-phosphate
  modified_base 5: mod_base = OTHER; note = 2'-O-methyladenosine-3'-phosphate
  modified_base 6: mod_base = OTHER; note = 2'-deoxy-2'-fluoroguanosine-3'-phosphate
  modified_base 7: mod_base = OTHER; note = 2'-O-methyluridine-3'-phosphate
  modified_base 8: mod_base = OTHER; note = 2'-deoxy-2'-fluoroguanosine-3'-phosphate
  modified_base 9: mod_base = OTHER; note = 2'-O-methyladenosine-3'-phosphate
  modified_base 10: mod_base = OTHER; note = 2'-deoxy-2'-fluoroguanosine-3'-phosphate
  modified_base 11: mod_base = OTHER; note = 2'-O-methyluridine-3'-phosphate
  modified_base 12: mod_base = OTHER; note = 2'-O-methyluridine-3'-phosphate
  modified_base 13: mod_base = OTHER; note = 2'-O-methyladenosine-3'-phosphate
  modified_base 14: mod_base = OTHER; note = 2'-deoxy-2'-fluorouridine-3'-phosphate
  modified_base 15: mod_base = OTHER; note = 2'-O-methyluridine-3'-phosphate
  modified_base 16: mod_base = OTHER; note = 2'-deoxy-2'-fluorouridine-3'-phosphate
  modified_base 17: mod_base = OTHER; note = 2'-O-methyluridine-3'-phosphate
  modified_base 18: mod_base = OTHER; note = 2'-deoxy-2'-fluoroguanosine-3'-phosphate
  modified_base 19: mod_base = OTHER; note = 2'-O-methyluridine-3'-phosphate
  modified_base 20: mod_base = OTHER; note = 2'-deoxy-2'-fluorocytidine-3'-phosphate
  modified_base 21: mod_base = OTHER; note = 2'-O-methyladenosine-3'-phosphorothioate
  modified_base 22: mod_base = OTHER; note = 2'-O-methyladenosine-3'-phosphorothioate
  modified_base 23: mod_base = OTHER; note = 2'-O-methyluridine-3'-phosphate ((2S,4R)-1-[29-[[2-(acetylamino)-2-deoxy-beta-D-galactopyra nosyl]oxy]-14,14-bis[[3-[[3-[[5-[[2-(acetylamino)-2-deoxy-b eta-D-galactopyranosyl]oxy]-1-oxopentyl]amino]propyl]amino] -3-oxopropoxy]methyl]-1,12,19,25-tetraoxo-16-oxa-13,20,24-t riazanonacos-1-yl]-4-hydroxy-2-pyrrolidinyl)methyl ester
ttatagtgagttattttgtcaat

SEQ ID NO: 138 - RNA, 23 nt, synthetic construct
  source 1..23: mol_type = other RNA
  modified_base 1: mod_base = OTHER; note = 2'-O-methyluridine-3'-phosphorothioate
  modified_base 2: mod_base = OTHER; note = 2'-deoxy-2'-fluorouridine-3'-phosphorothioate
  modified_base 3: mod_base = OTHER; note = 2'-O-methyladenosine-3'-phosphate
  modified_base 4: mod_base = OTHER; note = 2'-deoxy-2'-fluorouridine-3'-phosphate
  modified_base 5: mod_base = OTHER; note = 2'-O-methyladenosine-3'-phosphate
  modified_base 6: mod_base = OTHER; note = 2'-deoxy-2'-fluoroguanosine-3'-phosphate
  modified_base 7: mod_base = OTHER; note = 2'-O-methyluridine-3'-phosphate
  modified_base 8: mod_base = OTHER; note = 2'-deoxy-2'-fluoroguanosine-3'-phosphate
  modified_base 9: mod_base = OTHER; note = 2'-O-methyladenosine-3'-phosphate
  modified_base 10: mod_base = OTHER; note = 2'-deoxy-2'-fluoroguanosine-3'-phosphate
  modified_base 11: mod_base = OTHER; note = 2'-O-methyluridine-3'-phosphate
  modified_base 12: mod_base = OTHER; note = 2'-O-methyluridine-3'-phosphate
  modified_base 13: mod_base = OTHER; note = 2'-O-methyladenosine-3'-phosphate
  modified_base 14: mod_base = OTHER; note = 2'-deoxy-2'-fluorouridine-3'-phosphate
  modified_base 15: mod_base = OTHER; note = 2'-O-methyluridine-3'-phosphate
  modified_base 16: mod_base = OTHER; note = 2'-deoxy-2'-fluorouridine-3'-phosphate
  modified_base 17: mod_base = OTHER; note = 2'-O-methyluridine-3'-phosphate
  modified_base 18: mod_base = OTHER; note = 2'-deoxy-2'-fluoroguanosine-3'-phosphate
  modified_base 19: mod_base = OTHER; note = 2'-O-methyluridine-3'-phosphate
  modified_base 20: mod_base = OTHER; note = 2'-deoxy-2'-fluorocytidine-3'-phosphate
  modified_base 21: mod_base = OTHER; note = 2'-O-methyladenosine-3'-phosphate
  modified_base 22: mod_base = OTHER; note = 2'-O-methyladenosine-3'-phosphate
  modified_base 23: mod_base = OTHER; note = 2'-O-methyluridine-3'-phosphate ((2S,4R)-1-[29-[[2-(acetylamino)-2-deoxy-beta-D-galactopyra nosyl]oxy]-14,14-bis[[3-[[3-[[5-[[2-(acetylamino)-2-deoxy-b eta-D-galactopyranosyl]oxy]-1-oxopentyl]amino]propyl]amino] -3-oxopropoxy]methyl]-1,12,19,25-tetraoxo-16-oxa-13,20,24-t riazanonacos-1-yl]-4-hydroxy-2-pyrrolidinyl)methyl ester
ttatagtgagttattttgtcaat

SEQ ID NO: 139 - RNA, 23 nt, synthetic construct
  source 1..23: mol_type = other RNA
  modified_base 1: mod_base = OTHER; note = 2'-O-methyluridine-3'-phosphorothioate
  modified_base 2: mod_base = OTHER; note = 2'-deoxy-2'-fluoroadenosine-3'-phosphorothioate
  modified_base 3: mod_base = OTHER; note = 2'-O-methyladenosine-3'-phosphate
  modified_base 4: mod_base = OTHER; note = 2'-O-methyladenosine-3'-phosphate
  modified_base 5: mod_base = OTHER; note = 2'-O-methylguanosine-3'-phosphate
  modified_base 6: mod_base = OTHER; note = 2'-deoxy-2'-fluorocytidine-3'-phosphate
  modified_base 7: mod_base = OTHER; note = 2'-O-methyladenosine-3'-phosphate
  modified_base 8: mod_base = OTHER; note = 2'-O-methylcytidine-3'-phosphate
  modified_base 9: mod_base = OTHER; note = 2'-O-methyluridine-3'-phosphate
  modified_base 10: mod_base = OTHER; note = 2'-O-methyluridine-3'-phosphate
  modified_base 11: mod_base = OTHER; note = 2'-O-methyluridine-3'-phosphate
  modified_base 12: mod_base = OTHER; note = 2'-O-methyladenosine-3'-phosphate
  modified_base 13: mod_base = OTHER; note = 2'-O-methyluridine-3'-phosphate
  modified_base 14: mod_base = OTHER; note = 2'-deoxy-2'-fluorouridine-3'-phosphate
  modified_base 15: mod_base = OTHER; note = 2'-O-methylguanosine-3'-phosphate
  modified_base 16: mod_base = OTHER; note = 2'-deoxy-2'-fluoroadenosine-3'-phosphate
  modified_base 17: mod_base = OTHER; note = 2'-O-methylguanosine-3'-phosphate
  modified_base 18: mod_base = OTHER; note = 2'-O-methyluridine-3'-phosphate
  modified_base 19: mod_base = OTHER; note = 2'-O-methyluridine-3'-phosphate
  modified_base 20: mod_base = OTHER; note = 2'-O-methyluridine-3'-phosphate
  modified_base 21: mod_base = OTHER; note = 2'-O-methylcytidine-3'-phosphorothioate
  modified_base 22: mod_base = OTHER; note = 2'-O-methyluridine-3'-phosphorothioate
  modified_base 23: mod_base = OTHER; note = 2'-O-methylguanosine-3'-phosphate ((2S,4R)-1-[29-[[2-(acetylamino)-2-deoxy-beta-D-galactopyra nosyl]oxy]-14,14-bis[[3-[[3-[[5-[[2-(acetylamino)-2-deoxy-b eta-D-galactopyranosyl]oxy]-1-oxopentyl]amino]propyl]amino] -3-oxopropoxy]methyl]-1,12,19,25-tetraoxo-16-oxa-13,20,24-t riazanonacos-1-yl]-4-hydroxy-2-pyrrolidinyl)methyl ester
taaagcactttattgagtttctg

SEQ ID NO: 140 - RNA, 23 nt, synthetic construct
  source 1..23: mol_type = other RNA
  modified_base 1: mod_base = OTHER; note = 2'-O-methyluridine-3'-phosphorothioate
  modified_base 2: mod_base = OTHER; note = 2'-deoxy-2'-fluoroadenosine-3'-phosphorothioate
  modified_base 3: mod_base = OTHER; note = 2'-O-methyladenosine-3'-phosphate
  modified_base 4: mod_base = OTHER; note = 2'-O-methyladenosine-3'-phosphate
  modified_base 5: mod_base = OTHER; note = 2'-O-methylguanosine-3'-phosphate
  modified_base 6: mod_base = OTHER; note = 2'-deoxy-2'-fluorocytidine-3'-phosphate
  modified_base 7: mod_base = OTHER; note = 2'-O-methyladenosine-3'-phosphate
  modified_base 8: mod_base = OTHER; note = 2'-O-methylcytidine-3'-phosphate
  modified_base 9: mod_base = OTHER; note = 2'-O-methyluridine-3'-phosphate
  modified_base 10: mod_base = OTHER; note = 2'-O-methyluridine-3'-phosphate
  modified_base 11: mod_base = OTHER; note = 2'-O-methyluridine-3'-phosphate
  modified_base 12: mod_base = OTHER; note = 2'-O-methyladenosine-3'-phosphate
  modified_base 13: mod_base = OTHER; note = 2'-O-methyluridine-3'-phosphate
  modified_base 14: mod_base = OTHER; note = 2'-deoxy-2'-fluorouridine-3'-phosphate
  modified_base 15: mod_base = OTHER; note = 2'-O-methylguanosine-3'-phosphate
  modified_base 16: mod_base = OTHER; note = 2'-deoxy-2'-fluoroadenosine-3'-phosphate
  modified_base 17: mod_base = OTHER; note = 2'-O-methylguanosine-3'-phosphate
  modified_base 18: mod_base = OTHER; note = 2'-O-methyluridine-3'-phosphate
  modified_base 19: mod_base = OTHER; note = 2'-O-methyluridine-3'-phosphate
  modified_base 20: mod_base = OTHER; note = 2'-O-methyluridine-3'-phosphate
  modified_base 21: mod_base = OTHER; note = 2'-O-methylcytidine-3'-phosphate
  modified_base 22: mod_base = OTHER; note = 2'-O-methyluridine-3'-phosphate
  modified_base 23: mod_base = OTHER; note = 2'-O-methylguanosine-3'-phosphate ((2S,4R)-1-[29-[[2-(acetylamino)-2-deoxy-beta-D-galactopyra nosyl]oxy]-14,14-bis[[3-[[3-[[5-[[2-(acetylamino)-2-deoxy-b eta-D-galactopyranosyl]oxy]-1-oxopentyl]amino]propyl]amino] -3-oxopropoxy]methyl]-1,12,19,25-tetraoxo-16-oxa-13,20,24-t riazanonacos-1-yl]-4-hydroxy-2-pyrrolidinyl)methyl ester
taaagcactttattgagtttctg

SEQ ID NO: 141 - RNA, 23 nt, synthetic construct
  source 1..23: mol_type = other RNA
  modified_base 1: mod_base = OTHER; note = 2'-O-methyluridine-3'-phosphorothioate
  modified_base 2: mod_base = OTHER; note = 2'-deoxy-2'-fluoroadenosine-3'-phosphorothioate
  modified_base 3: mod_base = OTHER; note = 2'-O-methyladenosine-3'-phosphate
  modified_base 4: mod_base = OTHER; note = 2'-O-methyladenosine-3'-phosphate
  modified_base 5: mod_base = OTHER; note = 2'-O-methylguanosine-3'-phosphate
  modified_base 6: mod_base = OTHER; note = 2'-deoxy-2'-fluorocytidine-3'-phosphate
  modified_base 7: mod_base = OTHER; note = 2'-O-methyladenosine-3'-phosphate
  modified_base 8: mod_base = OTHER; note = 2'-O-methylcytidine-3'-phosphate
  modified_base 9: mod_base = OTHER; note = 2'-O-methyluridine-3'-phosphate
  modified_base 10: mod_base = OTHER; note = 2'-O-methyluridine-3'-phosphate
  modified_base 11: mod_base = OTHER; note = 2'-O-methyluridine-3'-phosphate
  modified_base 12: mod_base = OTHER; note = 2'-O-methyladenosine-3'-phosphate
  modified_base 13: mod_base = OTHER; note = 2'-O-methyluridine-3'-phosphate
  modified_base 14: mod_base = OTHER; note = 2'-deoxy-2'-fluorouridine-3'-phosphate
  modified_base 15: mod_base = OTHER; note = 2'-O-methylguanosine-3'-phosphate
  modified_base 16: mod_base = OTHER; note = 2'-deoxy-2'-fluoroadenosine-3'-phosphate
  modified_base 17: mod_base = OTHER; note = 2'-O-methylguanosine-3'-phosphate
  modified_base 18: mod_base = OTHER; note = 2'-O-methyluridine-3'-phosphate
  modified_base 19: mod_base = OTHER; note = 2'-O-methyluridine-3'-phosphate
  modified_base 20: mod_base = OTHER; note = 2'-O-methyluridine-3'-phosphate
  modified_base 21: mod_base = OTHER; note = 2'-O-methylcytidine-3'-phosphorothioate
  modified_base 22: mod_base = OTHER; note = 2'-O-methyluridine-3'-phosphorothioate
  modified_base 23: mod_base = OTHER; note = 2'-O-methylguanosine
taaagcactttattgagtttctg

SEQ ID NO: 142 - RNA, 23 nt, synthetic construct
  source 1..23: mol_type = other RNA
  modified_base 1: mod_base = OTHER; note = 2'-O-methyluridine-3'-phosphorothioate 5'-(E)-Vinylphosphonate
  modified_base 2: mod_base = OTHER; note = 2'-deoxy-2'-fluorouridine-3'-phosphorothioate
  modified_base 3: mod_base = OTHER; note = 2'-O-methyladenosine-3'-phosphate
  modified_base 4: mod_base = OTHER; note = 2'-deoxy-2'-fluorouridine-3'-phosphorothioate
  modified_base 5: mod_base = OTHER; note = 2'-O-methyladenosine-3'-phosphate
  modified_base 6: mod_base = OTHER; note = 2'-deoxy-2'-fluoroguanosine-3'-phosphorothioate
  modified_base 7: mod_base = OTHER; note = 2'-O-methyladenosine-3'-phosphate
  modified_base 8: mod_base = OTHER; note = 2'-deoxy-2'-fluoroguanosine-3'-phosphorothioate
  modified_base 9: mod_base = OTHER; note = 2'-O-methylcytidine-3'-phosphate
  modified_base 10: mod_base = OTHER; note = 2'-deoxy-2'-fluoroadenosine-3'-phosphorothioate
  modified_base 11: mod_base = OTHER; note = 2'-O-methyladenosine-3'-phosphate
  modified_base 12: mod_base = OTHER; note = 2'-O-methylguanosine-3'-phosphorothioate
  modified_base 13: mod_base = OTHER; note = 2'-O-methyladenosine-3'-phosphate
  modified_base 14: mod_base = OTHER; note = 2'-deoxy-2'-fluoroadenosine-3'-phosphorothioate
  modified_base 15: mod_base = OTHER; note = 2'-O-methylcytidine-3'-phosphate
  modified_base 16: mod_base = OTHER; note = 2'-deoxy-2'-fluoroadenosine-3'-phosphorothioate
  modified_base 17: mod_base = OTHER; note = 2'-O-methylcytidine-3'-phosphate
  modified_base 18: mod_base = OTHER; note = 2'-deoxy-2'-fluorouridine-3'-phosphorothioate
  modified_base 19: mod_base = OTHER; note = 2'-O-methylguanosine-3'-phosphate
  modified_base 20: mod_base = OTHER; note = 2'-deoxy-2'-fluorouridine-3'-phosphorothioate
  modified_base 21: mod_base = OTHER; note = 2'-O-methyluridine-3'-phosphorothioate
  modified_base 22: mod_base = OTHER; note = 2'-O-methyluridine-3'-phosphorothioate
  modified_base 23: mod_base = OTHER; note = 2'-O-methyluridine-3'-phosphate ((2S,4R)-1-[29-[[2-(acetylamino)-2-deoxy-beta-D-galactopyra nosyl]oxy]-14,14-bis[[3-[[3-[[5-[[2-(acetylamino)-2-deoxy-b eta-D-galactopyranosyl]oxy]-1-oxopentyl]amino]propyl]amino] -3-oxopropoxy]methyl]-1,12,19,25-tetraoxo-16-oxa-13,20,24-t riazanonacos-1-yl]-4-hydroxy-2-pyrrolidinyl)methyl ester
ttatagagcaagaacactgtttt

SEQ ID NO: 143 - RNA, 23 nt, synthetic construct
  source 1..23: mol_type = other RNA
  modified_base 1: mod_base = OTHER; note = 2'-O-methyluridine-3'-phosphorothioate 5'-(E)-Vinylphosphonate
  modified_base 2: mod_base = OTHER; note = 2'-deoxy-2'-fluorouridine-3'-phosphorothioate
  modified_base 3: mod_base = OTHER; note = 2'-O-methyladenosine-3'-phosphate
  modified_base 4: mod_base = OTHER; note = 2'-O-methyluridine-3'-phosphorothioate
  modified_base 5: mod_base = OTHER; note = 2'-O-methyladenosine-3'-phosphate
  modified_base 6: mod_base = OTHER; note = 2'-deoxy-2'-fluoroguanosine-3'-phosphorothioate
  modified_base 7: mod_base = OTHER; note = 2'-O-methyladenosine-3'-phosphate
  modified_base 8: mod_base = OTHER; note = 2'-deoxy-2'-fluoroguanosine-3'-phosphorothioate
  modified_base 9: mod_base = OTHER; note = 2'-deoxy-2'-fluorocytidine-3'-phosphorothioate
  modified_base 10: mod_base = OTHER; note = 2'-O-methyladenosine-3'-phosphate
  modified_base 11: mod_base = OTHER; note = 2'-O-methyladenosine-3'-phosphorothioate
  modified_base 12: mod_base = OTHER; note = 2'-O-methylguanosine-3'-phosphate
  modified_base 13: mod_base = OTHER; note = 2'-O-methyladenosine-3'-phosphorothioate
  modified_base 14: mod_base = OTHER; note = 2'-deoxy-2'-fluoroadenosine-3'-phosphorothioate
  modified_base 15: mod_base = OTHER; note = 2'-O-methylcytidine-3'-phosphate
  modified_base 16: mod_base = OTHER; note = 2'-deoxy-2'-fluoroadenosine-3'-phosphorothioate
  modified_base 17: mod_base = OTHER; note = 2'-O-methylcytidine-3'-phosphate
  modified_base 18: mod_base = OTHER; note = 2'-O-methyluridine-3'-phosphorothioate
  modified_base 19: mod_base = OTHER; note = 2'-O-methylguanosine-3'-phosphate
  modified_base 20: mod_base = OTHER; note = 2'-O-methyluridine-3'-phosphorothioate
  modified_base 21: mod_base = OTHER; note = 2'-O-methyluridine-3'-phosphorothioate
  modified_base 22: mod_base = OTHER; note = 2'-O-methyluridine-3'-phosphorothioate
  modified_base 23: mod_base = OTHER; note = 2'-O-methyluridine-3'-phosphate ((2S,4R)-1-[29-[[2-(acetylamino)-2-deoxy-beta-D-galactopyra nosyl]oxy]-14,14-bis[[3-[[3-[[5-[[2-(acetylamino)-2-deoxy-b eta-D-galactopyranosyl]oxy]-1-oxopentyl]amino]propyl]amino] -3-oxopropoxy]methyl]-1,12,19,25-tetraoxo-16-oxa-13,20,24-t riazanonacos-1-yl]-4-hydroxy-2-pyrrolidinyl)methyl ester
ttatagagcaagaacactgtttt

SEQ ID NO: 144 - RNA, 21 nt, synthetic construct
  source 1..21: mol_type = other RNA
  modified_base 1: mod_base = OTHER; note 5'-deoxy-5'-morpholino-2'-O-methyluridine-3'-phosphorothioa te
  modified_base 2: mod_base = OTHER; note = 2'-O-methylguanosine-3'-phosphorothioate
  modified_base 3: mod_base = OTHER; note = 2'-deoxy-2'-fluorouridine-3'-phosphate
  modified_base 4: mod_base = OTHER; note = 2'-O-methylguanosine-3'-phosphate
  modified_base 5: mod_base = OTHER; note = 2'-deoxy-2'-fluoroadenosine-3'-phosphate
  modified_base 6: mod_base = OTHER; note = 2'-O-methylcytidine-3'-phosphate
  modified_base 7: mod_base = OTHER; note = 2'-deoxy-2'-fluoroadenosine-3'-phosphate
  modified_base 8: mod_base = OTHER; note = 2'-O-methyladenosine-3'-phosphate
  modified_base 9: mod_base = OTHER; note = 2'-deoxy-2'-fluoroadenosine-3'-phosphate
  modified_base 10: mod_base = OTHER; note = 2'-deoxy-2'-fluorouridine-3'-phosphate
  modified_base 11: mod_base = OTHER; note = 2'-deoxy-2'-fluoroadenosine-3'-phosphate
  modified_base 12: mod_base = OTHER; note = 2'-O-methyluridine-3'-phosphate
  modified_base 13: mod_base = OTHER; note = 2'-deoxy-2'-fluoroguanosine-3'-phosphate
  modified_base 14: mod_base = OTHER; note = 2'-O-methylguanosine-3'-phosphate
  modified_base 15: mod_base = OTHER; note = 2'-deoxy-2'-fluoroguanosine-3'-phosphate
  modified_base 16: mod_base = OTHER; note = 2'-O-methylcytidine-3'-phosphate
  modified_base 17: mod_base = OTHER; note = 2'-deoxy-2'-fluoroadenosine-3'-phosphate
  modified_base 18: mod_base = OTHER; note = 2'-O-methyluridine-3'-phosphate
  modified_base 19: mod_base = OTHER; note = 2'-deoxy-2'-fluorocytidine-3'-phosphate
  modified_base 20: mod_base = OTHER; note = 2'-O-methyladenosine-3'-phosphate
  modified_base 21: mod_base = OTHER; note = 2'-deoxy-2'-fluoroadenosine-3'-phosphate ((2S,4R)-1-[29-[[2-(acetylamino)-2-deoxy-beta-D-galactopyra nosyl]oxy]-14,14-bis[[3-[[3-[[5-[[2-(acetylamino)-2-deoxy-b eta-D-galactopyranosyl]oxy]-1-oxopentyl]amino]propyl]amino] -3-oxopropoxy]methyl]-1,12,19,25-tetraoxo-16-oxa-13,20,24-t riazanonacos-1-yl]-4-hydroxy-2-pyrrolidinyl)methyl ester
tgtgacaaatatgggcatcaa

SEQ ID NO: 145 - RNA, 23 nt, synthetic construct
  source 1..23: mol_type = other RNA
  modified_base 1: mod_base = OTHER; note = 2'-O-methyluridine-3'-phosphorothioate
  modified_base 2: mod_base = OTHER; note = 2'-deoxy-2'-fluorouridine-3'-phosphorothioate
  modified_base 3: mod_base = OTHER; note = 2'-O-methylguanosine-3'-phosphate
  modified_base 4: mod_base = OTHER; note = 2'-deoxy-2'-fluoroadenosine-3'-phosphate
  modified_base 5: mod_base = OTHER; note = 2'-O-methyluridine-3'-phosphate
  modified_base 6: mod_base = OTHER; note = 2'-deoxy-2'-fluoroguanosine-3'-phosphate
  modified_base 7: mod_base = OTHER; note = 2'-O-methylcytidine-3'-phosphate
  modified_base 8: mod_base = OTHER; note = 2'-deoxy-2'-fluorocytidine-3'-phosphate
  modified_base 9: mod_base = OTHER; note = 2'-O-methylcytidine-3'-phosphate
  modified_base 10: mod_base = OTHER; note = 2'-deoxy-2'-fluoroadenosine-3'-phosphate
  modified_base 11: mod_base = OTHER; note = 2'-O-methyluridine-3'-phosphate
  modified_base 12: mod_base = OTHER; note = 2'-O-methyladenosine-3'-phosphate
  modified_base 13: mod_base = OTHER; note = 2'-O-methyluridine-3'-phosphate
  modified_base 14: mod_base = OTHER; note = 2'-deoxy-2'-fluorouridine-3'-phosphate
  modified_base 15: mod_base = OTHER; note = 2'-O-methyluridine-3'-phosphate
  modified_base 16: mod_base = OTHER; note = 2'-deoxy-2'-fluoroguanosine-3'-phosphate
  modified_base 17: mod_base = OTHER; note = 2'-O-methyluridine-3'-phosphate
  modified_base 18: mod_base = OTHER; note = 2'-deoxy-2'-fluorocytidine-3'-phosphate
  modified_base 19: mod_base = OTHER; note = 2'-O-methyladenosine-3'-phosphate
  modified_base 20: mod_base = OTHER; note = 2'-deoxy-2'-fluorocytidine-3'-phosphate
  modified_base 21: mod_base = OTHER; note = 2'-O-methyladenosine-3'-phosphorothioate
  modified_base 22: mod_base = OTHER; note = 2'-O-methyladenosine-3'-phosphorothioate
  modified_base 23: mod_base = OTHER; note = 2'-O-methyladenosine
ttgatgcccatatttgtcacaaa

SEQ ID NO: 146 - RNA, 21 nt, synthetic construct
  source 1..21: mol_type = other RNA
  modified_base 1: mod_base = OTHER; note = 2'-O-methyluridine-3'-phosphorothioate
  modified_base 2: mod_base = OTHER; note = 2'-O-methylguanosine-3'-phosphorothioate
  modified_base 3: mod_base = OTHER; note = 2'-deoxy-2'-fluorouridine-3'-phosphate
  modified_base 4: mod_base = OTHER; note = 2'-O-methylguanosine-3'-phosphate
  modified_base 5: mod_base = OTHER; note = 2'-deoxy-2'-fluoroadenosine-3'-phosphate
  modified_base 6: mod_base = OTHER; note = 2'-O-methylcytidine-3'-phosphate
  modified_base 7: mod_base = OTHER; note = 2'-deoxy-2'-fluoroadenosine-3'-phosphate
  modified_base 8: mod_base = OTHER; note = 2'-O-methyladenosine-3'-phosphate
  modified_base 9: mod_base = OTHER; note = 2'-deoxy-2'-fluoroadenosine-3'-phosphate
  modified_base 10: mod_base = OTHER; note = 2'-deoxy-2'-fluorouridine-3'-phosphate
  modified_base 11: mod_base = OTHER; note = 2'-deoxy-2'-fluoroadenosine-3'-phosphate
  modified_base 12: mod_base = OTHER; note = 2'-O-methyluridine-3'-phosphate
  modified_base 13: mod_base = OTHER; note = 2'-deoxy-2'-fluoroguanosine-3'-phosphate
  modified_base 14: mod_base = OTHER; note = 2'-O-methylguanosine-3'-phosphate
  modified_base 15: mod_base = OTHER; note = 2'-deoxy-2'-fluoroguanosine-3'-phosphate
  modified_base 16: mod_base = OTHER; note = 2'-O-methylcytidine-3'-phosphate
  modified_base 17: mod_base = OTHER; note = 2'-deoxy-2'-fluoroadenosine-3'-phosphate
  modified_base 18: mod_base = OTHER; note = 2'-O-methyluridine-3'-phosphate
  modified_base 19: mod_base = OTHER; note = 2'-deoxy-2'-fluorocytidine-3'-phosphate
  modified_base 20: mod_base = OTHER; note = 2'-O-methyladenosine-3'-phosphate
  modified_base 21: mod_base = OTHER; note = 2'-deoxy-2'-fluoroadenosine-3'-phosphate ((2S,4R)-1-[29-[[2-(acetylamino)-2-deoxy-beta-D-galactopyra nosyl]oxy]-14,14-bis[[3-[[3-[[5-[[2-(acetylamino)-2-deoxy-b eta-D-galactopyranosyl]oxy]-1-oxopentyl]amino]propyl]amino] -3-oxopropoxy]methyl]-1,12,19,25-tetraoxo-16-oxa-13,20,24-t riazanonacos-1-yl]-4-hydroxy-2-pyrrolidinyl)methyl ester
tgtgacaaatatgggcatcaa

SEQ ID NO: 147 - RNA, 23 nt, synthetic construct
  source 1..23: mol_type = other RNA
  modified_base 1: mod_base = OTHER; note 5'-deoxy-5'-morpholino-2'-O-methyluridine-3'-phosphorothioa te
  modified_base 2: mod_base = OTHER; note = 2'-deoxy-2'-fluorouridine-3'-phosphorothioate
  modified_base 3: mod_base = OTHER; note = 2'-O-methylguanosine-3'-phosphate
  modified_base 4: mod_base = OTHER; note = 2'-deoxy-2'-fluoroadenosine-3'-phosphate
  modified_base 5: mod_base = OTHER; note = 2'-O-methyluridine-3'-phosphate
  modified_base 6: mod_base = OTHER; note = 2'-deoxy-2'-fluoroguanosine-3'-phosphate
  modified_base 7: mod_base = OTHER; note = 2'-O-methylcytidine-3'-phosphate
  modified_base 8: mod_base = OTHER; note = 2'-deoxy-2'-fluorocytidine-3'-phosphate
  modified_base 9: mod_base = OTHER; note = 2'-O-methylcytidine-3'-phosphate
  modified_base 10: mod_base = OTHER; note = 2'-deoxy-2'-fluoroadenosine-3'-phosphate
  modified_base 11: mod_base = OTHER; note = 2'-O-methyluridine-3'-phosphate
  modified_base 12: mod_base = OTHER; note = 2'-O-methyladenosine-3'-phosphate
  modified_base 13: mod_base = OTHER; note = 2'-O-methyluridine-3'-phosphate
  modified_base 14: mod_base = OTHER; note = 2'-deoxy-2'-fluorouridine-3'-phosphate
  modified_base 15: mod_base = OTHER; note = 2'-O-methyluridine-3'-phosphate
  modified_base 16: mod_base = OTHER; note = 2'-deoxy-2'-fluoroguanosine-3'-phosphate
  modified_base 17: mod_base = OTHER; note = 2'-O-methyluridine-3'-phosphate
  modified_base 18: mod_base = OTHER; note = 2'-deoxy-2'-fluorocytidine-3'-phosphate
  modified_base 19: mod_base = OTHER; note = 2'-O-methyladenosine-3'-phosphate
  modified_base 20: mod_base = OTHER; note = 2'-deoxy-2'-fluorocytidine-3'-phosphate
  modified_base 21: mod_base = OTHER; note = 2'-O-methyladenosine-3'-phosphorothioate
  modified_base 22: mod_base = OTHER; note = 2'-O-methyladenosine-3'-phosphorothioate
  modified_base 23: mod_base = OTHER; note = 2'-O-methyladenosine
ttgatgcccatatttgtcacaaa

SEQ ID NO: 148 - RNA, 21 nt, synthetic construct
  source 1..21: mol_type = other RNA
  modified_base 1: mod_base = OTHER; note 5'-deoxy-5'-(N-morpholinylmethyl)-2'-O-methyluridine-3'-pho sphorothioate
  modified_base 2: mod_base = OTHER; note = 2'-O-methylguanosine-3'-phosphorothioate
  modified_base 3: mod_base = OTHER; note = 2'-deoxy-2'-fluorouridine-3'-phosphate
  modified_base 4: mod_base = OTHER; note = 2'-O-methylguanosine-3'-phosphate
  modified_base 5: mod_base = OTHER; note = 2'-deoxy-2'-fluoroadenosine-3'-phosphate
  modified_base 6: mod_base = OTHER; note = 2'-O-methylcytidine-3'-phosphate
  modified_base 7: mod_base = OTHER; note = 2'-deoxy-2'-fluoroadenosine-3'-phosphate
  modified_base 8: mod_base = OTHER; note = 2'-O-methyladenosine-3'-phosphate
  modified_base 9: mod_base = OTHER; note = 2'-deoxy-2'-fluoroadenosine-3'-phosphate
  modified_base 10: mod_base = OTHER; note = 2'-deoxy-2'-fluorouridine-3'-phosphate
  modified_base 11: mod_base = OTHER; note = 2'-deoxy-2'-fluoroadenosine-3'-phosphate
  modified_base 12: mod_base = OTHER; note = 2'-O-methyluridine-3'-phosphate
  modified_base 13: mod_base = OTHER; note = 2'-deoxy-2'-fluoroguanosine-3'-phosphate
  modified_base 14: mod_base = OTHER; note = 2'-O-methylguanosine-3'-phosphate
  modified_base 15: mod_base = OTHER; note = 2'-deoxy-2'-fluoroguanosine-3'-phosphate
  modified_base 16: mod_base = OTHER; note = 2'-O-methylcytidine-3'-phosphate
  modified_base 17: mod_base = OTHER; note = 2'-deoxy-2'-fluoroadenosine-3'-phosphate
  modified_base 18: mod_base = OTHER; note = 2'-O-methyluridine-3'-phosphate
  modified_base 19: mod_base = OTHER; note = 2'-deoxy-2'-fluorocytidine-3'-phosphate
  modified_base 20: mod_base = OTHER; note = 2'-O-methyladenosine-3'-phosphate
  modified_base 21: mod_base = OTHER; note = 2'-deoxy-2'-fluoroadenosine-3'-phosphate ((2S,4R)-1-[29-[[2-(acetylamino)-2-deoxy-beta-D-galactopyra nosyl]oxy]-14,14-bis[[3-[[3-[[5-[[2-(acetylamino)-2-deoxy-b eta-D-galactopyranosyl]oxy]-1-oxopentyl]amino]propyl]amino] -3-oxopropoxy]methyl]-1,12,19,25-tetraoxo-16-oxa-13,20,24-t riazanonacos-1-yl]-4-hydroxy-2-pyrrolidinyl)methyl ester
tgtgacaaatatgggcatcaa

SEQ ID NO: 149 - RNA, 23 nt, synthetic construct
  source 1..23: mol_type = other RNA
  modified_base 1: mod_base = OTHER; note = 2'-O-methyluridine-3'-phosphorothioate
  modified_base 2: mod_base = OTHER; note = 2'-deoxy-2'-fluorouridine-3'-phosphorothioate
  modified_base 3: mod_base = OTHER; note = 2'-O-methylguanosine-3'-phosphate
  modified_base 4: mod_base = OTHER; note = 2'-deoxy-2'-fluoroadenosine-3'-phosphate
  modified_base 5: mod_base = OTHER; note = 2'-O-methyluridine-3'-phosphate
  modified_base 6: mod_base = OTHER; note = 2'-deoxy-2'-fluoroguanosine-3'-phosphate
  modified_base 7: mod_base = OTHER; note = 2'-O-methylcytidine-3'-phosphate
  modified_base 8: mod_base = OTHER; note = 2'-deoxy-2'-fluorocytidine-3'-phosphate
  modified_base 9: mod_base = OTHER; note = 2'-O-methylcytidine-3'-phosphate
  modified_base 10: mod_base = OTHER; note = 2'-deoxy-2'-fluoroadenosine-3'-phosphate
  modified_base 11: mod_base = OTHER; note = 2'-O-methyluridine-3'-phosphate
  modified_base 12: mod_base = OTHER; note = 2'-O-methyladenosine-3'-phosphate
  modified_base 13: mod_base = OTHER; note = 2'-O-methyluridine-3'-phosphate
  modified_base 14: mod_base = OTHER; note = 2'-deoxy-2'-fluorouridine-3'-phosphate
  modified_base 15: mod_base = OTHER; note = 2'-O-methyluridine-3'-phosphate
  modified_base 16: mod_base = OTHER; note = 2'-deoxy-2'-fluoroguanosine-3'-phosphate
  modified_base 17: mod_base = OTHER; note = 2'-O-methyluridine-3'-phosphate
  modified_base 18: mod_base = OTHER; note = 2'-deoxy-2'-fluorocytidine-3'-phosphate
  modified_base 19: mod_base = OTHER; note = 2'-O-methyladenosine-3'-phosphate
  modified_base 20: mod_base = OTHER; note = 2'-deoxy-2'-fluorocytidine-3'-phosphate
  modified_base 21: mod_base = OTHER; note = 2'-O-methyladenosine-3'-phosphorothioate
  modified_base 22: mod_base = OTHER; note = 2'-O-methyladenosine-3'-phosphorothioate
  modified_base 23: mod_base = OTHER; note = 2'-O-methyladenosine
ttgatgcccatatttgtcacaaa

SEQ ID NO: 150 - RNA, 21 nt, synthetic construct
  source 1..21: mol_type = other RNA
  modified_base 1: mod_base = OTHER; note 5'-O-(N-piperidinyl)-2'-O-methyluridine-3'-phosphorothioate
  modified_base 2: mod_base = OTHER; note = 2'-O-methylguanosine-3'-phosphorothioate
  modified_base 3: mod_base = OTHER; note = 2'-deoxy-2'-fluorouridine-3'-phosphate
  modified_base 4: mod_base = OTHER; note = 2'-O-methylguanosine-3'-phosphate
  modified_base 5: mod_base = OTHER; note = 2'-deoxy-2'-fluoroadenosine-3'-phosphate
  modified_base 6: mod_base = OTHER; note = 2'-O-methylcytidine-3'-phosphate
  modified_base 7: mod_base = OTHER; note = 2'-deoxy-2'-fluoroadenosine-3'-phosphate
  modified_base 8: mod_base = OTHER; note = 2'-O-methyladenosine-3'-phosphate
  modified_base 9: mod_base = OTHER; note = 2'-deoxy-2'-fluoroadenosine-3'-phosphate
  modified_base 10: mod_base = OTHER; note = 2'-deoxy-2'-fluorouridine-3'-phosphate
  modified_base 11: mod_base = OTHER; note = 2'-deoxy-2'-fluoroadenosine-3'-phosphate
  modified_base 12: mod_base = OTHER; note = 2'-O-methyluridine-3'-phosphate
  modified_base 13: mod_base = OTHER; note = 2'-deoxy-2'-fluoroguanosine-3'-phosphate
  modified_base 14: mod_base = OTHER; note = 2'-O-methylguanosine-3'-phosphate
  modified_base 15: mod_base = OTHER; note = 2'-deoxy-2'-fluoroguanosine-3'-phosphate
  modified_base 16: mod_base = OTHER; note = 2'-O-methylcytidine-3'-phosphate
  modified_base 17: mod_base = OTHER; note = 2'-deoxy-2'-fluoroadenosine-3'-phosphate
  modified_base 18: mod_base = OTHER; note = 2'-O-methyluridine-3'-phosphate
  modified_base 19: mod_base = OTHER; note = 2'-deoxy-2'-fluorocytidine-3'-phosphate
  modified_base 20: mod_base = OTHER; note = 2'-O-methyladenosine-3'-phosphate
  modified_base 21: mod_base = OTHER; note = 2'-deoxy-2'-fluoroadenosine-3'-phosphate ((2S,4R)-1-[29-[[2-(acetylamino)-2-deoxy-beta-D-galactopyra nosyl]oxy]-14,14-bis[[3-[[3-[[5-[[2-(acetylamino)-2-deoxy-b eta-D-galactopyranosyl]oxy]-1-oxopentyl]amino]propyl]amino] -3-oxopropoxy]methyl]-1,12,19,25-tetraoxo-16-oxa-13,20,24-t riazanonacos-1-yl]-4-hydroxy-2-pyrrolidinyl)methyl ester
tgtgacaaatatgggcatcaa

SEQ ID NO: 151 - RNA, 23 nt, synthetic construct
  source 1..23: mol_type = other RNA
  modified_base 1: mod_base = OTHER; note = 2'-O-methyluridine-3'-phosphorothioate
  modified_base 2: mod_base = OTHER; note = 2'-deoxy-2'-fluorouridine-3'-phosphorothioate
  modified_base 3: mod_base = OTHER; note = 2'-O-methylguanosine-3'-phosphate
  modified_base 4: mod_base = OTHER; note = 2'-deoxy-2'-fluoroadenosine-3'-phosphate
  modified_base 5: mod_base = OTHER; note = 2'-O-methyluridine-3'-phosphate
  modified_base 6: mod_base = OTHER; note = 2'-deoxy-2'-fluoroguanosine-3'-phosphate
  modified_base 7: mod_base = OTHER; note = 2'-O-methylcytidine-3'-phosphate
  modified_base 8: mod_base = OTHER; note = 2'-deoxy-2'-fluorocytidine-3'-phosphate
  modified_base 9: mod_base = OTHER; note = 2'-O-methylcytidine-3'-phosphate
  modified_base 10: mod_base = OTHER; note = 2'-deoxy-2'-fluoroadenosine-3'-phosphate
  modified_base 11: mod_base = OTHER; note = 2'-O-methyluridine-3'-phosphate
  modified_base 12: mod_base = OTHER; note = 2'-O-methyladenosine-3'-phosphate
  modified_base 13: mod_base = OTHER; note = 2'-O-methyluridine-3'-phosphate
  modified_base 14: mod_base = OTHER; note = 2'-deoxy-2'-fluorouridine-3'-phosphate
  modified_base 15: mod_base = OTHER; note = 2'-O-methyluridine-3'-phosphate
  modified_base 16: mod_base = OTHER; note = 2'-deoxy-2'-fluoroguanosine-3'-phosphate
  modified_base 17: mod_base = OTHER; note = 2'-O-methyluridine-3'-phosphate
  modified_base 18: mod_base = OTHER; note = 2'-deoxy-2'-fluorocytidine-3'-phosphate
  modified_base 19: mod_base = OTHER; note = 2'-O-methyladenosine-3'-phosphate
  modified_base 20: mod_base = OTHER; note = 2'-deoxy-2'-fluorocytidine-3'-phosphate
  modified_base 21: mod_base = OTHER; note = 2'-O-methyladenosine-3'-phosphorothioate
  modified_base 22: mod_base = OTHER; note = 2'-O-methyladenosine-3'-phosphorothioate
  modified_base 23: mod_base = OTHER; note = 2'-O-methyladenosine
ttgatgcccatatttgtcacaaa

SEQ ID NO: 152 - RNA, 21 nt, synthetic construct
  source 1..21: mol_type = other RNA
  modified_base 1: mod_base = OTHER; note 5'-O-(N-morpholinyl)-2'-O-methyluridine-3'-phosphorothioate
  modified_base 2: mod_base = OTHER; note = 2'-O-methylguanosine-3'-phosphorothioate
  modified_base 3: mod_base = OTHER; note = 2'-deoxy-2'-fluorouridine-3'-phosphate
  modified_base 4: mod_base = OTHER; note = 2'-O-methylguanosine-3'-phosphate
  modified_base 5: mod_base = OTHER; note = 2'-deoxy-2'-fluoroadenosine-3'-phosphate
  modified_base 6: mod_base = OTHER; note = 2'-O-methylcytidine-3'-phosphate
  modified_base 7: mod_base = OTHER; note = 2'-deoxy-2'-fluoroadenosine-3'-phosphate
  modified_base 8: mod_base = OTHER; note = 2'-O-methyladenosine-3'-phosphate
  modified_base 9: mod_base = OTHER; note = 2'-deoxy-2'-fluoroadenosine-3'-phosphate
  modified_base 10: mod_base = OTHER; note = 2'-deoxy-2'-fluorouridine-3'-phosphate
  modified_base 11: mod_base = OTHER; note = 2'-deoxy-2'-fluoroadenosine-3'-phosphate
  modified_base 12: mod_base = OTHER; note = 2'-O-methyluridine-3'-phosphate
  modified_base 13: mod_base = OTHER; note = 2'-deoxy-2'-fluoroguanosine-3'-phosphate
  modified_base 14: mod_base = OTHER; note = 2'-O-methylguanosine-3'-phosphate
  modified_base 15: mod_base = OTHER; note = 2'-deoxy-2'-fluoroguanosine-3'-phosphate
  modified_base 16: mod_base = OTHER; note = 2'-O-methylcytidine-3'-phosphate
  modified_base 17: mod_base = OTHER; note = 2'-deoxy-2'-fluoroadenosine-3'-phosphate
  modified_base 18: mod_base = OTHER; note = 2'-O-methyluridine-3'-phosphate
  modified_base 19: mod_base = OTHER; note = 2'-deoxy-2'-fluorocytidine-3'-phosphate
  modified_base 20: mod_base = OTHER; note = 2'-O-methyladenosine-3'-phosphate
  modified_base 21: mod_base = OTHER; note = 2'-deoxy-2'-fluoroadenosine-3'-phosphate ((2S,4R)-1-[29-[[2-(acetylamino)-2-deoxy-beta-D-galactopyra nosyl]oxy]-14,14-bis[[3-[[3-[[5-[[2-(acetylamino)-2-deoxy-b eta-D-galactopyranosyl]oxy]-1-oxopentyl]amino]propyl]amino] -3-oxopropoxy]methyl]-1,12,19,25-tetraoxo-16-oxa-13,20,24-t riazanonacos-1-yl]-4-hydroxy-2-pyrrolidinyl)methyl ester
tgtgacaaatatgggcatcaa

SEQ ID NO: 153 - RNA, 23 nt, synthetic construct
  source 1..23: mol_type = other RNA
  modified_base 1: mod_base = OTHER; note = 2'-O-methyluridine-3'-phosphorothioate
  modified_base 2: mod_base = OTHER; note = 2'-deoxy-2'-fluorouridine-3'-phosphorothioate
  modified_base 3: mod_base = OTHER; note = 2'-O-methylguanosine-3'-phosphate
  modified_base 4: mod_base = OTHER; note = 2'-deoxy-2'-fluoroadenosine-3'-phosphate
  modified_base 5: mod_base = OTHER; note = 2'-O-methyluridine-3'-phosphate
  modified_base 6: mod_base = OTHER; note = 2'-deoxy-2'-fluoroguanosine-3'-phosphate
  modified_base 7: mod_base = OTHER; note = 2'-O-methylcytidine-3'-phosphate
  modified_base 8: mod_base = OTHER; note = 2'-deoxy-2'-fluorocytidine-3'-phosphate
  modified_base 9: mod_base = OTHER; note = 2'-O-methylcytidine-3'-phosphate
  modified_base 10: mod_base = OTHER; note = 2'-deoxy-2'-fluoroadenosine-3'-phosphate
  modified_base 11: mod_base = OTHER; note = 2'-O-methyluridine-3'-phosphate
  modified_base 12: mod_base = OTHER; note = 2'-O-methyladenosine-3'-phosphate
  modified_base 13: mod_base = OTHER; note = 2'-O-methyluridine-3'-phosphate
  modified_base 14: mod_base = OTHER; note = 2'-deoxy-2'-fluorouridine-3'-phosphate
  modified_base 15: mod_base = OTHER; note = 2'-O-methyluridine-3'-phosphate
  modified_base 16: mod_base = OTHER; note = 2'-deoxy-2'-fluoroguanosine-3'-phosphate
  modified_base 17: mod_base = OTHER; note = 2'-O-methyluridine-3'-phosphate
  modified_base 18: mod_base = OTHER; note = 2'-deoxy-2'-fluorocytidine-3'-phosphate
  modified_base 19: mod_base = OTHER; note = 2'-O-methyladenosine-3'-phosphate
  modified_base 20: mod_base = OTHER; note = 2'-deoxy-2'-fluorocytidine-3'-phosphate
  modified_base 21: mod_base = OTHER; note = 2'-O-methyladenosine-3'-phosphorothioate
  modified_base 22: mod_base = OTHER; note = 2'-O-methyladenosine-3'-phosphorothioate
  modified_base 23: mod_base = OTHER; note = 2'-O-methyladenosine
ttgatgcccatatttgtcacaaa

SEQ ID NO: 154 - RNA, 21 nt, synthetic construct
  source 1..21: mol_type = other RNA
  modified_base 1: mod_base = OTHER; note = 2'-O-methyluridine-3'-phosphorothioate
  modified_base 2: mod_base = OTHER; note = 2'-O-methylguanosine-3'-phosphorothioate
  modified_base 3: mod_base = OTHER; note = 2'-deoxy-2'-fluorouridine-3'-phosphate
  modified_base 4: mod_base = OTHER; note = 2'-O-methylguanosine-3'-phosphate
  modified_base 5: mod_base = OTHER; note = 2'-deoxy-2'-fluoroadenosine-3'-phosphate
  modified_base 6: mod_base = OTHER; note = 2'-O-methylcytidine-3'-phosphate
  modified_base 7: mod_base = OTHER; note = 2'-deoxy-2'-fluoroadenosine-3'-phosphate
  modified_base 8: mod_base = OTHER; note = 2'-O-methyladenosine-3'-phosphate
  modified_base 9: mod_base = OTHER; note = 2'-deoxy-2'-fluoroadenosine-3'-phosphate
  modified_base 10: mod_base = OTHER; note = 2'-deoxy-2'-fluorouridine-3'-phosphate
  modified_base 11: mod_base = OTHER; note = 2'-deoxy-2'-fluoroadenosine-3'-phosphate
  modified_base 12: mod_base = OTHER; note = 2'-O-methyluridine-3'-phosphate
  modified_base 13: mod_base = OTHER; note = 2'-deoxy-2'-fluoroguanosine-3'-phosphate
  modified_base 14: mod_base = OTHER; note = 2'-O-methylguanosine-3'-phosphate
  modified_base 15: mod_base = OTHER; note = 2'-deoxy-2'-fluoroguanosine-3'-phosphate
  modified_base 16: mod_base = OTHER; note = 2'-O-methylcytidine-3'-phosphate
  modified_base 17: mod_base = OTHER; note = 2'-deoxy-2'-fluoroadenosine-3'-phosphate
  modified_base 18: mod_base = OTHER; note = 2'-O-methyluridine-3'-phosphate
  modified_base 19: mod_base = OTHER; note = 2'-deoxy-2'-fluorocytidine-3'-phosphate
  modified_base 20: mod_base = OTHER; note = 2'-O-methyladenosine-3'-phosphate
  modified_base 21: mod_base = OTHER; note = 2'-deoxy-2'-fluoroadenosine-3'-phosphate ((2S,4R)-1-[29-[[2-(acetylamino)-2-deoxy-beta-D-galactopyra nosyl]oxy]-14,14-bis[[3-[[3-[[5-[[2-(acetylamino)-2-deoxy-b eta-D-galactopyranosyl]oxy]-1-oxopentyl]amino]propyl]amino] -3-oxopropoxy]methyl]-1,12,19,25-tetraoxo-16-oxa-13,20,24-t riazanonacos-1-yl]-4-hydroxy-2-pyrrolidinyl)methyl ester
tgtgacaaatatgggcatcaa

SEQ ID NO: 155 - RNA, 23 nt, synthetic construct
  source 1..23: mol_type = other RNA
  modified_base 1: mod_base = OTHER; note 5'-deoxy-5'-(N-morpholinylmethyl)-2'-O-methyluridine-3'-pho sphorothioate
  modified_base 2: mod_base = OTHER; note = 2'-deoxy-2'-fluorouridine-3'-phosphorothioate
  modified_base 3: mod_base = OTHER; note = 2'-O-methylguanosine-3'-phosphate
  modified_base 4: mod_base = OTHER; note = 2'-deoxy-2'-fluoroadenosine-3'-phosphate
  modified_base 5: mod_base = OTHER; note = 2'-O-methyluridine-3'-phosphate
  modified_base 6: mod_base = OTHER; note = 2'-deoxy-2'-fluoroguanosine-3'-phosphate
  modified_base 7: mod_base = OTHER; note = 2'-O-methylcytidine-3'-phosphate
  modified_base 8: mod_base = OTHER; note = 2'-deoxy-2'-fluorocytidine-3'-phosphate
  modified_base 9: mod_base = OTHER; note = 2'-O-methylcytidine-3'-phosphate
  modified_base 10: mod_base = OTHER; note = 2'-deoxy-2'-fluoroadenosine-3'-phosphate
  modified_base 11: mod_base = OTHER; note = 2'-O-methyluridine-3'-phosphate
  modified_base 12: mod_base = OTHER; note = 2'-O-methyladenosine-3'-phosphate
  modified_base 13: mod_base = OTHER; note = 2'-O-methyluridine-3'-phosphate
  modified_base 14: mod_base = OTHER; note = 2'-deoxy-2'-fluorouridine-3'-phosphate
  modified_base 15: mod_base = OTHER; note = 2'-O-methyluridine-3'-phosphate
  modified_base 16: mod_base = OTHER; note = 2'-deoxy-2'-fluoroguanosine-3'-phosphate
  modified_base 17: mod_base = OTHER; note = 2'-O-methyluridine-3'-phosphate
  modified_base 18: mod_base = OTHER; note = 2'-deoxy-2'-fluorocytidine-3'-phosphate
  modified_base 19: mod_base = OTHER; note = 2'-O-methyladenosine-3'-phosphate
  modified_base 20: mod_base = OTHER; note = 2'-deoxy-2'-fluorocytidine-3'-phosphate
  modified_base 21: mod_base = OTHER; note = 2'-O-methyladenosine-3'-phosphorothioate
  modified_base 22: mod_base = OTHER; note = 2'-O-methyladenosine-3'-phosphorothioate
  modified_base 23: mod_base = OTHER; note = 2'-O-methyladenosine
ttgatgcccatatttgtcacaaa

SEQ ID NO: 156 - RNA, 21 nt, synthetic construct
  source 1..21: mol_type = other RNA
  modified_base 1: mod_base = OTHER; note = 2'-O-methyluridine-3'-phosphorothioate
  modified_base 2: mod_base = OTHER; note = 2'-O-methylguanosine-3'-phosphorothioate
  modified_base 3: mod_base = OTHER; note = 2'-deoxy-2'-fluorouridine-3'-phosphate
  modified_base 4: mod_base = OTHER; note = 2'-O-methylguanosine-3'-phosphate
  modified_base 5: mod_base = OTHER; note = 2'-deoxy-2'-fluoroadenosine-3'-phosphate
  modified_base 6: mod_base = OTHER; note = 2'-O-methylcytidine-3'-phosphate
  modified_base 7: mod_base = OTHER; note = 2'-deoxy-2'-fluoroadenosine-3'-phosphate
  modified_base 8: mod_base = OTHER; note = 2'-O-methyladenosine-3'-phosphate
  modified_base 9: mod_base = OTHER; note = 2'-deoxy-2'-fluoroadenosine-3'-phosphate
  modified_base 10: mod_base = OTHER; note = 2'-deoxy-2'-fluorouridine-3'-phosphate
  modified_base 11: mod_base = OTHER; note = 2'-deoxy-2'-fluoroadenosine-3'-phosphate
  modified_base 12: mod_base = OTHER; note = 2'-O-methyluridine-3'-phosphate
  modified_base 13: mod_base = OTHER; note = 2'-deoxy-2'-fluoroguanosine-3'-phosphate
  modified_base 14: mod_base = OTHER; note = 2'-O-methylguanosine-3'-phosphate
  modified_base 15: mod_base = OTHER; note = 2'-deoxy-2'-fluoroguanosine-3'-phosphate
  modified_base 16: mod_base = OTHER; note = 2'-O-methylcytidine-3'-phosphate
  modified_base 17: mod_base = OTHER; note = 2'-deoxy-2'-fluoroadenosine-3'-phosphate
  modified_base 18: mod_base = OTHER; note = 2'-O-methyluridine-3'-phosphate
  modified_base 19: mod_base = OTHER; note = 2'-deoxy-2'-fluorocytidine-3'-phosphate
  modified_base 20: mod_base = OTHER; note = 2'-O-methyladenosine-3'-phosphate
  modified_base 21: mod_base = OTHER; note = 2'-deoxy-2'-fluoroadenosine-3'-phosphate ((2S,4R)-1-[29-[[2-(acetylamino)-2-deoxy-beta-D-galactopyra nosyl]oxy]-14,14-bis[[3-[[3-[[5-[[2-(acetylamino)-2-deoxy-b eta-D-galactopyranosyl]oxy]-1-oxopentyl]amino]propyl]amino] -3-oxopropoxy]methyl]-1,12,19,25-tetraoxo-16-oxa-13,20,24-t riazanonacos-1-yl]-4-hydroxy-2-pyrrolidinyl)methyl ester
tgtgacaaatatgggcatcaa

SEQ ID NO: 157 - RNA, 23 nt, synthetic construct
  source 1..23: mol_type = other RNA
  modified_base 1: mod_base = OTHER; note 5'-O-(N-piperidinyl)-2'-O-methyluridine-3'-phosphorothioate
  modified_base 2: mod_base = OTHER; note = 2'-deoxy-2'-fluorouridine-3'-phosphorothioate
  modified_base 3: mod_base = OTHER; note = 2'-O-methylguanosine-3'-phosphate
  modified_base 4: mod_base = OTHER; note = 2'-deoxy-2'-fluoroadenosine-3'-phosphate
  modified_base 5: mod_base = OTHER; note = 2'-O-methyluridine-3'-phosphate
  modified_base 6: mod_base = OTHER; note = 2'-deoxy-2'-fluoroguanosine-3'-phosphate
  modified_base 7: mod_base = OTHER; note = 2'-O-methylcytidine-3'-phosphate
  modified_base 8: mod_base = OTHER; note = 2'-deoxy-2'-fluorocytidine-3'-phosphate
  modified_base 9: mod_base = OTHER; note = 2'-O-methylcytidine-3'-phosphate
  modified_base 10: mod_base = OTHER; note = 2'-deoxy-2'-fluoroadenosine-3'-phosphate
  modified_base 11: mod_base = OTHER; note = 2'-O-methyluridine-3'-phosphate
  modified_base 12: mod_base = OTHER; note = 2'-O-methyladenosine-3'-phosphate
  modified_base 13: mod_base = OTHER; note = 2'-O-methyluridine-3'-phosphate
  modified_base 14: mod_base = OTHER; note = 2'-deoxy-2'-fluorouridine-3'-phosphate
  modified_base 15: mod_base = OTHER; note = 2'-O-methyluridine-3'-phosphate
  modified_base 16: mod_base = OTHER; note = 2'-deoxy-2'-fluoroguanosine-3'-phosphate
  modified_base 17: mod_base = OTHER; note = 2'-O-methyluridine-3'-phosphate
  modified_base 18: mod_base = OTHER; note = 2'-deoxy-2'-fluorocytidine-3'-phosphate
  modified_base 19: mod_base = OTHER; note = 2'-O-methyladenosine-3'-phosphate
  modified_base 20: mod_base = OTHER; note = 2'-deoxy-2'-fluorocytidine-3'-phosphate
  modified_base 21: mod_base = OTHER; note = 2'-O-methyladenosine-3'-phosphorothioate
  modified_base 22: mod_base = OTHER; note = 2'-O-methyladenosine-3'-phosphorothioate
  modified_base 23: mod_base = OTHER; note = 2'-O-methyladenosine
ttgatgcccatatttgtcacaaa

SEQ ID NO: 158 - RNA, 21 nt, synthetic construct
  source 1..21: mol_type = other RNA
  modified_base 1: mod_base = OTHER; note = 2'-O-methyluridine-3'-phosphorothioate
  modified_base 2: mod_base = OTHER; note = 2'-O-methylguanosine-3'-phosphorothioate
  modified_base 3: mod_base = OTHER; note = 2'-deoxy-2'-fluorouridine-3'-phosphate
  modified_base 4: mod_base = OTHER; note = 2'-O-methylguanosine-3'-phosphate
  modified_base 5: mod_base = OTHER; note = 2'-deoxy-2'-fluoroadenosine-3'-phosphate
  modified_base 6: mod_base = OTHER; note = 2'-O-methylcytidine-3'-phosphate
  modified_base 7: mod_base = OTHER; note = 2'-deoxy-2'-fluoroadenosine-3'-phosphate
  modified_base 8: mod_base = OTHER; note = 2'-O-methyladenosine-3'-phosphate
  modified_base 9: mod_base = OTHER; note = 2'-deoxy-2'-fluoroadenosine-3'-phosphate
  modified_base 10: mod_base = OTHER; note = 2'-deoxy-2'-fluorouridine-3'-phosphate
  modified_base 11: mod_base = OTHER; note = 2'-deoxy-2'-fluoroadenosine-3'-phosphate
  modified_base 12: mod_base = OTHER; note = 2'-O-methyluridine-3'-phosphate
  modified_base 13: mod_base = OTHER; note = 2'-deoxy-2'-fluoroguanosine-3'-phosphate
  modified_base 14: mod_base = OTHER; note = 2'-O-methylguanosine-3'-phosphate
  modified_base 15: mod_base = OTHER; note = 2'-deoxy-2'-fluoroguanosine-3'-phosphate
  modified_base 16: mod_base = OTHER; note = 2'-O-methylcytidine-3'-phosphate
  modified_base 17: mod_base = OTHER; note = 2'-deoxy-2'-fluoroadenosine-3'-phosphate
  modified_base 18: mod_base = OTHER; note = 2'-O-methyluridine-3'-phosphate
  modified_base 19: mod_base = OTHER; note = 2'-deoxy-2'-fluorocytidine-3'-phosphate
  modified_base 20: mod_base = OTHER; note = 2'-O-methyladenosine-3'-phosphate
  modified_base 21: mod_base = OTHER; note = 2'-deoxy-2'-fluoroadenosine-3'-phosphate ((2S,4R)-1-[29-[[2-(acetylamino)-2-deoxy-beta-D-galactopyra nosyl]oxy]-14,14-bis[[3-[[3-[[5-[[2-(acetylamino)-2-deoxy-b eta-D-galactopyranosyl]oxy]-1-oxopentyl]amino]propyl]amino] -3-oxopropoxy]methyl]-1,12,19,25-tetraoxo-16-oxa-13,20,24-t riazanonacos-1-yl]-4-hydroxy-2-pyrrolidinyl)methyl ester
tgtgacaaatatgggcatcaa

SEQ ID NO: 159 - RNA, 23 nt, synthetic construct
  source 1..23: mol_type = other RNA
  modified_base 1: mod_base = OTHER; note 5'-O-(N-morpholinyl)-2'-O-methyluridine-3'-phosphorothioate
  modified_base 2: mod_base = OTHER; note = 2'-deoxy-2'-fluorouridine-3'-phosphorothioate
  modified_base 3: mod_base = OTHER; note = 2'-O-methylguanosine-3'-phosphate
  modified_base 4: mod_base = OTHER; note = 2'-deoxy-2'-fluoroadenosine-3'-phosphate
  modified_base 5: mod_base = OTHER; note = 2'-O-methyluridine-3'-phosphate
  modified_base 6: mod_base = OTHER; note = 2'-deoxy-2'-fluoroguanosine-3'-phosphate
  modified_base 7: mod_base = OTHER; note = 2'-O-methylcytidine-3'-phosphate
  modified_base 8: mod_base = OTHER; note = 2'-deoxy-2'-fluorocytidine-3'-phosphate
  modified_base 9: mod_base = OTHER; note = 2'-O-methylcytidine-3'-phosphate
  modified_base 10: mod_base = OTHER; note = 2'-deoxy-2'-fluoroadenosine-3'-phosphate
  modified_base 11: mod_base = OTHER; note = 2'-O-methyluridine-3'-phosphate
  modified_base 12: mod_base = OTHER; note = 2'-O-methyladenosine-3'-phosphate
  modified_base 13: mod_base = OTHER; note = 2'-O-methyluridine-3'-phosphate
  modified_base 14: mod_base = OTHER; note = 2'-deoxy-2'-fluorouridine-3'-phosphate
  modified_base 15: mod_base = OTHER; note = 2'-O-methyluridine-3'-phosphate
  modified_base 16: mod_base = OTHER; note = 2'-deoxy-2'-fluoroguanosine-3'-phosphate
  modified_base 17: mod_base = OTHER; note = 2'-O-methyluridine-3'-phosphate
  modified_base 18: mod_base = OTHER; note = 2'-deoxy-2'-fluorocytidine-3'-phosphate
  modified_base 19: mod_base = OTHER; note = 2'-O-methyladenosine-3'-phosphate
  modified_base 20: mod_base = OTHER; note = 2'-deoxy-2'-fluorocytidine-3'-phosphate
  modified_base 21: mod_base = OTHER; note = 2'-O-methyladenosine-3'-phosphorothioate
  modified_base 22: mod_base = OTHER; note = 2'-O-methyladenosine-3'-phosphorothioate
  modified_base 23: mod_base = OTHER; note = 2'-O-methyladenosine
ttgatgcccatatttgtcacaaa

SEQ ID NO: 160 - RNA, 21 nt, synthetic construct
  source 1..21: mol_type = other RNA
  modified_base 1: mod_base = OTHER; note 5'-deoxy-5'-morpholino-2'-O-methyluridine-3'-phosphorothioa te
  modified_base 2: mod_base = OTHER; note = 2'-O-methylguanosine-3'-phosphorothioate
  modified_base 3: mod_base = OTHER; note = 2'-deoxy-2'-fluorouridine-3'-phosphate
  modified_base 4: mod_base = OTHER; note = 2'-O-methylguanosine-3'-phosphate
  modified_base 5: mod_base = OTHER; note = 2'-deoxy-2'-fluoroadenosine-3'-phosphate
  modified_base 6: mod_base = OTHER; note = 2'-O-methylcytidine-3'-phosphate
  modified_base 7: mod_base = OTHER; note = 2'-deoxy-2'-fluoroadenosine-3'-phosphate
  modified_base 8: mod_base = OTHER; note = 2'-O-methyladenosine-3'-phosphate
  modified_base 9: mod_base = OTHER; note = 2'-deoxy-2'-fluoroadenosine-3'-phosphate
  modified_base 10: mod_base = OTHER; note = 2'-deoxy-2'-fluorouridine-3'-phosphate
  modified_base 11: mod_base = OTHER; note = 2'-deoxy-2'-fluoroadenosine-3'-phosphate
  modified_base 12: mod_base = OTHER; note = 2'-O-methyluridine-3'-phosphate
  modified_base 13: mod_base = OTHER; note = 2'-deoxy-2'-fluoroguanosine-3'-phosphate
  modified_base 14: mod_base = OTHER; note = 2'-O-methylguanosine-3'-phosphate
  modified_base 15: mod_base = OTHER; note = 2'-deoxy-2'-fluoroguanosine-3'-phosphate
  modified_base 16: mod_base = OTHER; note = 2'-O-methylcytidine-3'-phosphate
  modified_base 17: mod_base = OTHER; note = 2'-deoxy-2'-fluoroadenosine-3'-phosphate
  modified_base 18: mod_base = OTHER; note = 2'-O-methyluridine-3'-phosphate
  modified_base 19: mod_base = OTHER; note = 2'-deoxy-2'-fluorocytidine-3'-phosphate
  modified_base 20: mod_base = OTHER; note = 2'-O-methyladenosine-3'-phosphate
  modified_base 21: mod_base = OTHER; note = 2'-deoxy-2'-fluoroadenosine-3'-phosphate ((2S,4R)-1-[29-[[2-(acetylamino)-2-deoxy-beta-D-galactopyra nosyl]oxy]-14,14-bis[[3-[[3-[[5-[[2-(acetylamino)-2-deoxy-b eta-D-galactopyranosyl]oxy]-1-oxopentyl]amino]propyl]amino] -3-oxopropoxy]methyl]-1,12,19,25-tetraoxo-16-oxa-13,20,24-t riazanonacos-1-yl]-4-hydroxy-2-pyrrolidinyl)methyl ester
tgtgacaaatatgggcatcaa

SEQ ID NO: 161 - RNA, 21 nt, synthetic construct
  source 1..21: mol_type = other RNA
  modified_base 1: mod_base = OTHER; note 5'-deoxy-5'-(N-morpholinylmethyl)-2'-O-methyluridine-3'-pho sphorothioate
  modified_base 2: mod_base = OTHER; note = 2'-O-methylguanosine-3'-phosphorothioate
  modified_base 3: mod_base = OTHER; note = 2'-deoxy-2'-fluorouridine-3'-phosphate
  modified_base 4: mod_base = OTHER; note = 2'-O-methylguanosine-3'-phosphate
  modified_base 5: mod_base = OTHER; note = 2'-deoxy-2'-fluoroadenosine-3'-phosphate
  modified_base 6: mod_base = OTHER; note = 2'-O-methylcytidine-3'-phosphate
  modified_base 7: mod_base = OTHER; note = 2'-deoxy-2'-fluoroadenosine-3'-phosphate
  modified_base 8: mod_base = OTHER; note = 2'-O-methyladenosine-3'-phosphate
  modified_base 9: mod_base = OTHER; note = 2'-deoxy-2'-fluoroadenosine-3'-phosphate
  modified_base 10: mod_base = OTHER; note = 2'-deoxy-2'-fluorouridine-3'-phosphate
  modified_base 11: mod_base = OTHER; note = 2'-deoxy-2'-fluoroadenosine-3'-phosphate
  modified_base 12: mod_base = OTHER; note = 2'-O-methyluridine-3'-phosphate
  modified_base 13: mod_base = OTHER; note = 2'-deoxy-2'-fluoroguanosine-3'-phosphate
  modified_base 14: mod_base = OTHER; note = 2'-O-methylguanosine-3'-phosphate
  modified_base 15: mod_base = OTHER; note = 2'-deoxy-2'-fluoroguanosine-3'-phosphate
  modified_base 16: mod_base = OTHER; note = 2'-O-methylcytidine-3'-phosphate
  modified_base 17: mod_base = OTHER; note = 2'-deoxy-2'-fluoroadenosine-3'-phosphate
  modified_base 18: mod_base = OTHER; note = 2'-O-methyluridine-3'-phosphate
  modified_base 19: mod_base = OTHER; note = 2'-deoxy-2'-fluorocytidine-3'-phosphate
  modified_base 20: mod_base = OTHER; note = 2'-O-methyladenosine-3'-phosphate
  modified_base 21: mod_base = OTHER; note = 2'-deoxy-2'-fluoroadenosine-3'-phosphate ((2S,4R)-1-[29-[[2-(acetylamino)-2-deoxy-beta-D-galactopyra nosyl]oxy]-14,14-bis[[3-[[3-[[5-[[2-(acetylamino)-2-deoxy-b eta-D-galactopyranosyl]oxy]-1-oxopentyl]amino]propyl]amino] -3-oxopropoxy]methyl]-1,12,19,25-tetraoxo-16-oxa-13,20,24-t riazanonacos-1-yl]-4-hydroxy-2-pyrrolidinyl)methyl ester
tgtgacaaatatgggcatcaa

SEQ ID NO: 162 - RNA, 21 nt, synthetic construct
  source 1..21: mol_type = other RNA
  modified_base 1: mod_base = OTHER; note 5'-O-(N-piperidinyl)-2'-O-methyluridine-3'-phosphorothioate
  modified_base 2: mod_base = OTHER; note = 2'-O-methylguanosine-3'-phosphorothioate
  modified_base 3: mod_base = OTHER; note = 2'-deoxy-2'-fluorouridine-3'-phosphate
  modified_base 4: mod_base = OTHER; note = 2'-O-methylguanosine-3'-phosphate
  modified_base 5: mod_base = OTHER; note = 2'-deoxy-2'-fluoroadenosine-3'-phosphate
  modified_base 6: mod_base = OTHER; note = 2'-O-methylcytidine-3'-phosphate
  modified_base 7: mod_base = OTHER; note = 2'-deoxy-2'-fluoroadenosine-3'-phosphate
  modified_base 8: mod_base = OTHER; note = 2'-O-methyladenosine-3'-phosphate
  modified_base 9: mod_base = OTHER; note = 2'-deoxy-2'-fluoroadenosine-3'-phosphate
  modified_base 10: mod_base = OTHER; note = 2'-deoxy-2'-fluorouridine-3'-phosphate
  modified_base 11: mod_base = OTHER; note = 2'-deoxy-2'-fluoroadenosine-3'-phosphate
  modified_base 12: mod_base = OTHER; note = 2'-O-methyluridine-3'-phosphate
  modified_base 13: mod_base = OTHER; note = 2'-deoxy-2'-fluoroguanosine-3'-phosphate
  modified_base 14: mod_base = OTHER; note = 2'-O-methylguanosine-3'-phosphate
  modified_base 15: mod_base = OTHER; note = 2'-deoxy-2'-fluoroguanosine-3'-phosphate
  modified_base 16: mod_base = OTHER; note = 2'-O-methylcytidine-3'-phosphate
  modified_base 17: mod_base = OTHER; note = 2'-deoxy-2'-fluoroadenosine-3'-phosphate
  modified_base 18: mod_base = OTHER; note = 2'-O-methyluridine-3'-phosphate
  modified_base 19: mod_base = OTHER; note = 2'-deoxy-2'-fluorocytidine-3'-phosphate
  modified_base 20: mod_base = OTHER; note = 2'-O-methyladenosine-3'-phosphate
  modified_base 21: mod_base = OTHER; note = 2'-deoxy-2'-fluoroadenosine-3'-phosphate ((2S,4R)-1-[29-[[2-(acetylamino)-2-deoxy-beta-D-galactopyra nosyl]oxy]-14,14-bis[[3-[[3-[[5-[[2-(acetylamino)-2-deoxy-b eta-D-galactopyranosyl]oxy]-1-oxopentyl]amino]propyl]amino] -3-oxopropoxy]methyl]-1,12,19,25-tetraoxo-16-oxa-13,20,24-t riazanonacos-1-yl]-4-hydroxy-2-pyrrolidinyl)methyl ester
tgtgacaaatatgggcatcaa

SEQ ID NO: 163 - RNA, 21 nt, synthetic construct
  source 1..21: mol_type = other RNA
  modified_base 1: mod_base = OTHER; note 5'-O-(N-morpholinyl)-2'-O-methyluridine-3'-phosphorothioate
  modified_base 2: mod_base = OTHER; note = 2'-O-methylguanosine-3'-phosphorothioate
  modified_base 3: mod_base = OTHER; note = 2'-deoxy-2'-fluorouridine-3'-phosphate
  modified_base 4: mod_base = OTHER; note = 2'-O-methylguanosine-3'-phosphate
  modified_base 5: mod_base = OTHER; note = 2'-deoxy-2'-fluoroadenosine-3'-phosphate
  modified_base 6: mod_base = OTHER; note = 2'-O-methylcytidine-3'-phosphate
  modified_base 7: mod_base = OTHER; note = 2'-deoxy-2'-fluoroadenosine-3'-phosphate
  modified_base 8: mod_base = OTHER; note = 2'-O-methyladenosine-3'-phosphate
  modified_base 9: mod_base = OTHER; note = 2'-deoxy-2'-fluoroadenosine-3'-phosphate
  modified_base 10: mod_base = OTHER; note = 2'-deoxy-2'-fluorouridine-3'-phosphate
  modified_base 11: mod_base = OTHER; note = 2'-deoxy-2'-fluoroadenosine-3'-phosphate
  modified_base 12: mod_base = OTHER; note = 2'-O-methyluridine-3'-phosphate
  modified_base 13: mod_base = OTHER; note = 2'-deoxy-2'-fluoroguanosine-3'-phosphate
  modified_base 14: mod_base = OTHER; note = 2'-O-methylguanosine-3'-phosphate
  modified_base 15: mod_base = OTHER; note = 2'-deoxy-2'-fluoroguanosine-3'-phosphate
  modified_base 16: mod_base = OTHER; note = 2'-O-methylcytidine-3'-phosphate
  modified_base 17: mod_base = OTHER; note = 2'-deoxy-2'-fluoroadenosine-3'-phosphate
  modified_base 18: mod_base = OTHER; note = 2'-O-methyluridine-3'-phosphate
  modified_base 19: mod_base = OTHER; note = 2'-deoxy-2'-fluorocytidine-3'-phosphate
  modified_base 20: mod_base = OTHER; note = 2'-O-methyladenosine-3'-phosphate
  modified_base 21: mod_base = OTHER; note = 2'-deoxy-2'-fluoroadenosine-3'-phosphate ((2S,4R)-1-[29-[[2-(acetylamino)-2-deoxy-beta-D-galactopyra nosyl]oxy]-14,14-bis[[3-[[3-[[5-[[2-(acetylamino)-2-deoxy-b eta-D-galactopyranosyl]oxy]-1-oxopentyl]amino]propyl]amino] -3-oxopropoxy]methyl]-1,12,19,25-tetraoxo-16-oxa-13,20,24-t riazanonacos-1-yl]-4-hydroxy-2-pyrrolidinyl)methyl ester
tgtgacaaatatgggcatcaa

SEQ ID NO: 164 - RNA, 21 nt, synthetic construct
  source 1..21: mol_type = other RNA
  modified_base 1: mod_base = OTHER; note = 2'-O-methyluridine-3'-phosphorothioate
  modified_base 2: mod_base = OTHER; note = 2'-O-methylguanosine-3'-phosphorothioate
  modified_base 3: mod_base = OTHER; note = 2'-deoxy-2'-fluorouridine-3'-phosphate
  modified_base 4: mod_base = OTHER; note = 2'-O-methylguanosine-3'-phosphate
  modified_base 5: mod_base = OTHER; note = 2'-deoxy-2'-fluoroadenosine-3'-phosphate
  modified_base 6: mod_base = OTHER; note = 2'-O-methylcytidine-3'-phosphate
  modified_base 7: mod_base = OTHER; note = 2'-deoxy-2'-fluoroadenosine-3'-phosphate
  modified_base 8: mod_base = OTHER; note = 2'-O-methyladenosine-3'-phosphate
  modified_base 9: mod_base = OTHER; note = 2'-deoxy-2'-fluoroadenosine-3'-phosphate
  modified_base 10: mod_base = OTHER; note = 2'-deoxy-2'-fluorouridine-3'-phosphate
  modified_base 11: mod_base = OTHER; note = 2'-deoxy-2'-fluoroadenosine-3'-phosphate
  modified_base 12: mod_base = OTHER; note = 2'-O-methyluridine-3'-phosphate
  modified_base 13: mod_base = OTHER; note = 2'-deoxy-2'-fluoroguanosine-3'-phosphate
  modified_base 14: mod_base = OTHER; note = 2'-O-methylguanosine-3'-phosphate
  modified_base 15: mod_base = OTHER; note = 2'-deoxy-2'-fluoroguanosine-3'-phosphate
  modified_base 16: mod_base = OTHER; note = 2'-O-methylcytidine-3'-phosphate
  modified_base 17: mod_base = OTHER; note = 2'-deoxy-2'-fluoroadenosine-3'-phosphate
  modified_base 18: mod_base = OTHER; note = 2'-O-methyluridine-3'-phosphate
  modified_base 19: mod_base = OTHER; note = 2'-deoxy-2'-fluorocytidine-3'-phosphate
  modified_base 20: mod_base = OTHER; note = 2'-O-methyladenosine-3'-phosphate
  modified_base 21: mod_base = OTHER; note = 2'-deoxy-2'-fluoroadenosine-3'-phosphate ((2S,4R)-1-[29-[[2-(acetylamino)-2-deoxy-beta-D-galactopyra nosyl]oxy]-14,14-bis[[3-[[3-[[5-[[2-(acetylamino)-2-deoxy-b eta-D-galactopyranosyl]oxy]-1-oxopentyl]amino]propyl]amino] -3-oxopropoxy]methyl]-1,12,19,25-tetraoxo-16-oxa-13,20,24-t riazanonacos-1-yl]-4-hydroxy-2-pyrrolidinyl)methyl ester
tgtgacaaatatgggcatcaa

SEQ ID NO: 165 - RNA, 23 nt, synthetic construct
  source 1..23: mol_type = other RNA
  modified_base 1: mod_base = OTHER; note = 2'-O-methyluridine-3'-phosphorothioate
  modified_base 2: mod_base = OTHER; note = 2'-deoxy-2'-fluorouridine-3'-phosphorothioate
  modified_base 3: mod_base = OTHER; note = 2'-O-methylguanosine-3'-phosphate
  modified_base 4: mod_base = OTHER; note = 2'-deoxy-2'-fluoroadenosine-3'-phosphate
  modified_base 5: mod_base = OTHER; note = 2'-O-methyluridine-3'-phosphate
  modified_base 6: mod_base = OTHER; note = 2'-deoxy-2'-fluoroguanosine-3'-phosphate
  modified_base 7: mod_base = OTHER; note = 2'-O-methylcytidine-3'-phosphate
  modified_base 8: mod_base = OTHER; note = 2'-deoxy-2'-fluorocytidine-3'-phosphate
  modified_base 9: mod_base = OTHER; note = 2'-O-methylcytidine-3'-phosphate
  modified_base 10: mod_base = OTHER; note = 2'-deoxy-2'-fluoroadenosine-3'-phosphate
  modified_base 11: mod_base = OTHER; note = 2'-O-methyluridine-3'-phosphate
  modified_base 12: mod_base = OTHER; note = 2'-O-methyladenosine-3'-phosphate
  modified_base 13: mod_base = OTHER; note = 2'-O-methyluridine-3'-phosphate
  modified_base 14: mod_base = OTHER; note = 2'-deoxy-2'-fluorouridine-3'-phosphate
  modified_base 15: mod_base = OTHER; note = 2'-O-methyluridine-3'-phosphate
  modified_base 16: mod_base = OTHER; note = 2'-deoxy-2'-fluoroguanosine-3'-phosphate
  modified_base 17: mod_base = OTHER; note = 2'-O-methyluridine-3'-phosphate
  modified_base 18: mod_base = OTHER; note = 2'-deoxy-2'-fluorocytidine-3'-phosphate
  modified_base 19: mod_base = OTHER; note = 2'-O-methyladenosine-3'-phosphate
  modified_base 20: mod_base = OTHER; note = 2'-deoxy-2'-fluorocytidine-3'-phosphate
  modified_base 21: mod_base = OTHER; note = 2'-O-methyladenosine-3'-phosphorothioate
  modified_base 22: mod_base = OTHER; note = 2'-O-methyladenosine-3'-phosphorothioate
  modified_base 23: mod_base = OTHER; note = 2'-O-methyladenosine
ttgatgcccatatttgtcacaaa

SEQ ID NO: 166 - RNA, 23 nt, synthetic construct
  source 1..23: mol_type = other RNA
  modified_base 1: mod_base = OTHER; note 5'-deoxy-5'-morpholino-2'-O-methyluridine-3'-phosphorothioa te
  modified_base 2: mod_base = OTHER; note = 2'-deoxy-2'-fluorouridine-3'-phosphorothioate
  modified_base 3: mod_base = OTHER; note = 2'-O-methylguanosine-3'-phosphate
  modified_base 4: mod_base = OTHER; note = 2'-deoxy-2'-fluoroadenosine-3'-phosphate
  modified_base 5: mod_base = OTHER; note = 2'-O-methyluridine-3'-phosphate
  modified_base 6: mod_base = OTHER; note = 2'-deoxy-2'-fluoroguanosine-3'-phosphate
  modified_base 7: mod_base = OTHER; note = 2'-O-methylcytidine-3'-phosphate
  modified_base 8: mod_base = OTHER; note = 2'-deoxy-2'-fluorocytidine-3'-phosphate
  modified_base 9: mod_base = OTHER; note = 2'-O-methylcytidine-3'-phosphate
  modified_base 10: mod_base = OTHER; note = 2'-deoxy-2'-fluoroadenosine-3'-phosphate
  modified_base 11: mod_base = OTHER; note = 2'-O-methyluridine-3'-phosphate
  modified_base 12: mod_base = OTHER; note = 2'-O-methyladenosine-3'-phosphate
  modified_base 13: mod_base = OTHER; note = 2'-O-methyluridine-3'-phosphate
  modified_base 14: mod_base = OTHER; note = 2'-deoxy-2'-fluorouridine-3'-phosphate
  modified_base 15: mod_base = OTHER; note = 2'-O-methyluridine-3'-phosphate
  modified_base 16: mod_base = OTHER; note = 2'-deoxy-2'-fluoroguanosine-3'-phosphate
  modified_base 17: mod_base = OTHER; note = 2'-O-methyluridine-3'-phosphate
  modified_base 18: mod_base = OTHER; note = 2'-deoxy-2'-fluorocytidine-3'-phosphate
  modified_base 19: mod_base = OTHER; note = 2'-O-methyladenosine-3'-phosphate
  modified_base 20: mod_base = OTHER; note = 2'-deoxy-2'-fluorocytidine-3'-phosphate
  modified_base 21: mod_base = OTHER; note = 2'-O-methyladenosine-3'-phosphorothioate
  modified_base 22: mod_base = OTHER; note = 2'-O-methyladenosine-3'-phosphorothioate
  modified_base 23: mod_base = OTHER; note = 2'-O-methyladenosine
ttgatgcccatatttgtcacaaa

SEQ ID NO: 167 - RNA, 23 nt, synthetic construct
  source 1..23: mol_type = other RNA
  modified_base 1: mod_base = OTHER; note 5'-deoxy-5'-(N-morpholinylmethyl)-2'-O-methyluridine-3'-pho sphorothioate
  modified_base 2: mod_base = OTHER; note = 2'-deoxy-2'-fluorouridine-3'-phosphorothioate
  modified_base 3: mod_base = OTHER; note = 2'-O-methylguanosine-3'-phosphate
  modified_base 4: mod_base = OTHER; note = 2'-deoxy-2'-fluoroadenosine-3'-phosphate
  modified_base 5: mod_base = OTHER; note = 2'-O-methyluridine-3'-phosphate
  modified_base 6: mod_base = OTHER; note = 2'-deoxy-2'-fluoroguanosine-3'-phosphate
  modified_base 7: mod_base = OTHER; note = 2'-O-methylcytidine-3'-phosphate
  modified_base 8: mod_base = OTHER; note = 2'-deoxy-2'-fluorocytidine-3'-phosphate
  modified_base 9: mod_base = OTHER; note = 2'-O-methylcytidine-3'-phosphate
  modified_base 10: mod_base = OTHER; note = 2'-deoxy-2'-fluoroadenosine-3'-phosphate
  modified_base 11: mod_base = OTHER; note = 2'-O-methyluridine-3'-phosphate
  modified_base 12: mod_base = OTHER; note = 2'-O-methyladenosine-3'-phosphate
  modified_base 13: mod_base = OTHER; note = 2'-O-methyluridine-3'-phosphate
  modified_base 14: mod_base = OTHER; note = 2'-deoxy-2'-fluorouridine-3'-phosphate
  modified_base 15: mod_base = OTHER; note = 2'-O-methyluridine-3'-phosphate
  modified_base 16: mod_base = OTHER; note = 2'-deoxy-2'-fluoroguanosine-3'-phosphate
  modified_base 17: mod_base = OTHER; note = 2'-O-methyluridine-3'-phosphate
  modified_base 18: mod_base = OTHER; note = 2'-deoxy-2'-fluorocytidine-3'-phosphate
  modified_base 19: mod_base = OTHER; note = 2'-O-methyladenosine-3'-phosphate
  modified_base 20: mod_base = OTHER; note = 2'-deoxy-2'-fluorocytidine-3'-phosphate
  modified_base 21: mod_base = OTHER; note = 2'-O-methyladenosine-3'-phosphorothioate
  modified_base 22: mod_base = OTHER; note = 2'-O-methyladenosine-3'-phosphorothioate
  modified_base 23: mod_base = OTHER; note = 2'-O-methyladenosine
ttgatgcccatatttgtcacaaa

SEQ ID NO: 168 - RNA, 23 nt, synthetic construct
  source 1..23: mol_type = other RNA
  modified_base 1: mod_base = OTHER; note 5'-deoxy-5'-(N-morpholinylmethyl)-2'-O-methyluridine-3'-pho sphorothioate
  modified_base 2: mod_base = OTHER; note = 2'-O-methyluridine-3'-phosphorothioate
  modified_base 3: mod_base = OTHER; note = 2'-O-methylguanosine-3'-phosphate
  modified_base 4: mod_base = OTHER; note = 2'-deoxy-2'-fluoroadenosine-3'-phosphate
  modified_base 5: mod_base = OTHER; note = 2'-O-methyluridine-3'-phosphate
  modified_base 6: mod_base = OTHER; note = 2'-deoxy-2'-fluoroguanosine-3'-phosphate
  modified_base 7: mod_base = OTHER; note = 2'-O-methylcytidine-3'-phosphate
  modified_base 8: mod_base = OTHER; note = 2'-deoxy-2'-fluorocytidine-3'-phosphate
  modified_base 9: mod_base = OTHER; note = 2'-O-methylcytidine-3'-phosphate
  modified_base 10: mod_base = OTHER; note = 2'-deoxy-2'-fluoroadenosine-3'-phosphate
  modified_base 11: mod_base = OTHER; note = 2'-O-methyluridine-3'-phosphate
  modified_base 12: mod_base = OTHER; note = 2'-O-methyladenosine-3'-phosphate
  modified_base 13: mod_base = OTHER; note = 2'-O-methyluridine-3'-phosphate
  modified_base 14: mod_base = OTHER; note = 2'-deoxy-2'-fluorouridine-3'-phosphate
  modified_base 15: mod_base = OTHER; note = 2'-O-methyluridine-3'-phosphate
  modified_base 16: mod_base = OTHER; note = 2'-deoxy-2'-fluoroguanosine-3'-phosphate
  modified_base 17: mod_base = OTHER; note = 2'-O-methyluridine-3'-phosphate
  modified_base 18: mod_base = OTHER; note = 2'-deoxy-2'-fluorocytidine-3'-phosphate
  modified_base 19: mod_base = OTHER; note = 2'-O-methyladenosine-3'-phosphate
  modified_base 20: mod_base = OTHER; note = 2'-deoxy-2'-fluorocytidine-3'-phosphate
  modified_base 21: mod_base = OTHER; note = 2'-O-methyladenosine-3'-phosphorothioate
  modified_base 22: mod_base = OTHER; note = 2'-O-methyladenosine-3'-phosphorothioate
  modified_base 23: mod_base = OTHER; note = 2'-O-methyladenosine
ttgatgcccatatttgtcacaaa

SEQ ID NO: 169 - RNA, 23 nt, synthetic construct
  source 1..23: mol_type = other RNA
  modified_base 1: mod_base = OTHER; note 5'-O-(N-piperidinyl)-2'-O-methyluridine-3'-phosphorothioate
  modified_base 2: mod_base = OTHER; note = 2'-deoxy-2'-fluorouridine-3'-phosphorothioate
  modified_base 3: mod_base = OTHER; note = 2'-O-methylguanosine-3'-phosphate
  modified_base 4: mod_base = OTHER; note = 2'-deoxy-2'-fluoroadenosine-3'-phosphate
  modified_base 5: mod_base = OTHER; note = 2'-O-methyluridine-3'-phosphate
  modified_base 6: mod_base = OTHER; note = 2'-deoxy-2'-fluoroguanosine-3'-phosphate
  modified_base 7: mod_base = OTHER; note = 2'-O-methylcytidine-3'-phosphate
  modified_base 8: mod_base = OTHER; note = 2'-deoxy-2'-fluorocytidine-3'-phosphate
  modified_base 9: mod_base = OTHER; note = 2'-O-methylcytidine-3'-phosphate
  modified_base 10: mod_base = OTHER; note = 2'-deoxy-2'-fluoroadenosine-3'-phosphate
  modified_base 11: mod_base = OTHER; note = 2'-O-methyluridine-3'-phosphate
  modified_base 12: mod_base = OTHER; note = 2'-O-methyladenosine-3'-phosphate
  modified_base 13: mod_base = OTHER; note = 2'-O-methyluridine-3'-phosphate
  modified_base 14: mod_base = OTHER; note = 2'-deoxy-2'-fluorouridine-3'-phosphate
  modified_base 15: mod_base = OTHER; note = 2'-O-methyluridine-3'-phosphate
  modified_base 16: mod_base = OTHER; note = 2'-deoxy-2'-fluoroguanosine-3'-phosphate
  modified_base 17: mod_base = OTHER; note = 2'-O-methyluridine-3'-phosphate
  modified_base 18: mod_base = OTHER; note = 2'-deoxy-2'-fluorocytidine-3'-phosphate
  modified_base 19: mod_base = OTHER; note = 2'-O-methyladenosine-3'-phosphate
  modified_base 20: mod_base = OTHER; note = 2'-deoxy-2'-fluorocytidine-3'-phosphate
  modified_base 21: mod_base = OTHER; note = 2'-O-methyladenosine-3'-phosphorothioate
  modified_base 22: mod_base = OTHER; note = 2'-O-methyladenosine-3'-phosphorothioate
  modified_base 23: mod_base = OTHER; note = 2'-O-methyladenosine
ttgatgcccatatttgtcacaaa

SEQ ID NO: 170 - RNA, 23 nt, synthetic construct
  source 1..23: mol_type = other RNA
  modified_base 1: mod_base = OTHER; note 5'-O-(N-morpholinyl)-2'-O-methyluridine-3'-phosphorothioate
  modified_base 2: mod_base = OTHER; note = 2'-deoxy-2'-fluorouridine-3'-phosphorothioate
  modified_base 3: mod_base = OTHER; note = 2'-O-methylguanosine-3'-phosphate
  modified_base 4: mod_base = OTHER; note = 2'-deoxy-2'-fluoroadenosine-3'-phosphate
  modified_base 5: mod_base = OTHER; note = 2'-O-methyluridine-3'-phosphate
  modified_base 6: mod_base = OTHER; note = 2'-deoxy-2'-fluoroguanosine-3'-phosphate
  modified_base 7: mod_base = OTHER; note = 2'-O-methylcytidine-3'-phosphate
  modified_base 8: mod_base = OTHER; note = 2'-deoxy-2'-fluorocytidine-3'-phosphate
  modified_base 9: mod_base = OTHER; note = 2'-O-methylcytidine-3'-phosphate
  modified_base 10: mod_base = OTHER; note = 2'-deoxy-2'-fluoroadenosine-3'-phosphate
  modified_base 11: mod_base = OTHER; note = 2'-O-methyluridine-3'-phosphate
  modified_base 12: mod_base = OTHER; note = 2'-O-methyladenosine-3'-phosphate
  modified_base 13: mod_base = OTHER; note = 2'-O-methyluridine-3'-phosphate
  modified_base 14: mod_base = OTHER; note = 2'-deoxy-2'-fluorouridine-3'-phosphate
  modified_base 15: mod_base = OTHER; note = 2'-O-methyluridine-3'-phosphate
  modified_base 16: mod_base = OTHER; note = 2'-deoxy-2'-fluoroguanosine-3'-phosphate
  modified_base 17: mod_base = OTHER; note = 2'-O-methyluridine-3'-phosphate
  modified_base 18: mod_base = OTHER; note = 2'-deoxy-2'-fluorocytidine-3'-phosphate
  modified_base 19: mod_base = OTHER; note = 2'-O-methyladenosine-3'-phosphate
  modified_base 20: mod_base = OTHER; note = 2'-deoxy-2'-fluorocytidine-3'-phosphate
  modified_base 21: mod_base = OTHER; note = 2'-O-methyladenosine-3'-phosphorothioate
  modified_base 22: mod_base = OTHER; note = 2'-O-methyladenosine-3'-phosphorothioate
  modified_base 23: mod_base = OTHER; note = 2'-O-methyladenosine
ttgatgcccatatttgtcacaaa

SEQ ID NO: 171 - RNA, 23 nt, synthetic construct
  source 1..23: mol_type = other RNA
  modified_base 1: mod_base = OTHER; note = 2'-O-methyluridine-3'-phosphorothioate
  modified_base 2: mod_base = OTHER; note = 2'-deoxy-2'-fluorouridine-3'-phosphorothioate
  modified_base 3: mod_base = OTHER; note = 2'-O-methyladenosine-3'-phosphate
  modified_base 4: mod_base = OTHER; note = 2'-O-methyluridine-3'-phosphate
  modified_base 5: mod_base = OTHER; note = 2'-O-methyladenosine-3'-phosphate
  modified_base 6: mod_base = OTHER; note = 2'-deoxy-2'-fluoroguanosine-3'-phosphate
  modified_base 7: mod_base = OTHER; note = 2'-O-methyladenosine-3'-phosphate
  modified_base 8: mod_base = OTHER; note = 2'-O-methylguanosine-3'-phosphate
  modified_base 9: mod_base = OTHER; note = 2'-O-methylcytidine-3'-phosphate
  modified_base 10: mod_base = OTHER; note = 2'-O-methyladenosine-3'-phosphate
  modified_base 11: mod_base = OTHER; note = 2'-O-methyladenosine-3'-phosphate
  modified_base 12: mod_base = OTHER; note = 2'-O-methylguanosine-3'-phosphate
  modified_base 13: mod_base = OTHER; note = 2'-O-methyladenosine-3'-phosphate
  modified_base 14: mod_base = OTHER; note = 2'-deoxy-2'-fluoroadenosine-3'-phosphate
  modified_base 15: mod_base = OTHER; note = 2'-O-methylcytidine-3'-phosphate
  modified_base 16: mod_base = OTHER; note = 2'-deoxy-2'-fluoroadenosine-3'-phosphate
  modified_base 17: mod_base = OTHER; note = 2'-O-methylcytidine-3'-phosphate
  modified_base 18: mod_base = OTHER; note = 2'-O-methyluridine-3'-phosphate
  modified_base 19: mod_base = OTHER; note = 2'-O-methylguanosine-3'-phosphate
  modified_base 20: mod_base = OTHER; note = 2'-O-methyluridine-3'-phosphate
  modified_base 21: mod_base = OTHER; note = 2'-O-methyluridine-3'-phosphorothioate
  modified_base 22: mod_base = OTHER; note = 2'-O-methyluridine-3'-phosphorothioate
  modified_base 23: mod_base = OTHER; note = 2'-O-methyluridine
ttatagagcaagaacactgtttt

SEQ ID NO: 172 - RNA, 23 nt, synthetic construct
  source 1..23: mol_type = other RNA
  modified_base 1: mod_base = OTHER; note = 2'-O-methyluridine-3'-phosphorothioate 5'-(E)-Vinylphosphonate
  modified_base 2: mod_base = OTHER; note = 2'-deoxy-2'-fluorouridine-3'-phosphorothioate
  modified_base 3: mod_base = OTHER; note = 2'-O-methyladenosine-3'-phosphate
  modified_base 4: mod_base = OTHER; note = 2'-O-methyluridine-3'-phosphate
  modified_base 5: mod_base = OTHER; note = 2'-O-methyladenosine-3'-phosphate
  modified_base 6: mod_base = OTHER; note = 2'-deoxy-2'-fluoroguanosine-3'-phosphate
  modified_base 7: mod_base = OTHER; note = 2'-O-methyladenosine-3'-phosphate
  modified_base 8: mod_base = OTHER; note = 2'-O-methylguanosine-3'-phosphate
  modified_base 9: mod_base = OTHER; note = 2'-O-methylcytidine-3'-phosphate
  modified_base 10: mod_base = OTHER; note = 2'-O-methyladenosine-3'-phosphate
  modified_base 11: mod_base = OTHER; note = 2'-O-methyladenosine-3'-phosphate
  modified_base 12: mod_base = OTHER; note = 2'-O-methylguanosine-3'-phosphate
  modified_base 13: mod_base = OTHER; note = 2'-O-methyladenosine-3'-phosphate
  modified_base 14: mod_base = OTHER; note = 2'-deoxy-2'-fluoroadenosine-3'-phosphate
  modified_base 15: mod_base = OTHER; note = 2'-O-methylcytidine-3'-phosphate
  modified_base 16: mod_base = OTHER; note = 2'-deoxy-2'-fluoroadenosine-3'-phosphate
  modified_base 17: mod_base = OTHER; note = 2'-O-methylcytidine-3'-phosphate
  modified_base 18: mod_base = OTHER; note = 2'-O-methyluridine-3'-phosphate
  modified_base 19: mod_base = OTHER; note = 2'-O-methylguanosine-3'-phosphate
  modified_base 20: mod_base = OTHER; note = 2'-O-methyluridine-3'-phosphate
  modified_base 21: mod_base = OTHER; note = 2'-O-methyluridine-3'-phosphorothioate
  modified_base 22: mod_base = OTHER; note = 2'-O-methyluridine-3'-phosphorothioate
  modified_base 23: mod_base = OTHER; note = 2'-O-methyluridine
ttatagagcaagaacactgtttt

SEQ ID NO: 173 - RNA, 23 nt, synthetic construct
  source 1..23: mol_type = other RNA
  modified_base 1: mod_base = OTHER; note 5'-deoxy-5'-morpholino-2'-O-methyluridine-3'-phosphorothioa te
  modified_base 2: mod_base = OTHER; note = 2'-deoxy-2'-fluorouridine-3'-phosphorothioate
  modified_base 3: mod_base = OTHER; note = 2'-O-methyladenosine-3'-phosphate
  modified_base 4: mod_base = OTHER; note = 2'-O-methyluridine-3'-phosphate
  modified_base 5: mod_base = OTHER; note = 2'-O-methyladenosine-3'-phosphate
  modified_base 6: mod_base = OTHER; note = 2'-deoxy-2'-fluoroguanosine-3'-phosphate
  modified_base 7: mod_base = OTHER; note = 2'-O-methyladenosine-3'-phosphate
  modified_base 8: mod_base = OTHER; note = 2'-O-methylguanosine-3'-phosphate
  modified_base 9: mod_base = OTHER; note = 2'-O-methylcytidine-3'-phosphate
  modified_base 10: mod_base = OTHER; note = 2'-O-methyladenosine-3'-phosphate
  modified_base 11: mod_base = OTHER; note = 2'-O-methyladenosine-3'-phosphate
  modified_base 12: mod_base = OTHER; note = 2'-O-methylguanosine-3'-phosphate
  modified_base 13: mod_base = OTHER; note = 2'-O-methyladenosine-3'-phosphate
  modified_base 14: mod_base = OTHER; note = 2'-deoxy-2'-fluoroadenosine-3'-phosphate
  modified_base 15: mod_base = OTHER; note = 2'-O-methylcytidine-3'-phosphate
  modified_base 16: mod_base = OTHER; note = 2'-deoxy-2'-fluoroadenosine-3'-phosphate
  modified_base 17: mod_base = OTHER; note = 2'-O-methylcytidine-3'-phosphate
  modified_base 18: mod_base = OTHER; note = 2'-O-methyluridine-3'-phosphate
  modified_base 19: mod_base = OTHER; note = 2'-O-methylguanosine-3'-phosphate
  modified_base 20: mod_base = OTHER; note = 2'-O-methyluridine-3'-phosphate
  modified_base 21: mod_base = OTHER; note = 2'-O-methyluridine-3'-phosphorothioate
  modified_base 22: mod_base = OTHER; note = 2'-O-methyluridine-3'-phosphorothioate
  modified_base 23: mod_base = OTHER; note = 2'-O-methyluridine
ttatagagcaagaacactgtttt

SEQ ID NO: 174 - RNA, 23 nt, synthetic construct
  source 1..23: mol_type = other RNA
  modified_base 1: mod_base = OTHER; note 5'-deoxy-5'-(N-morpholinylmethyl)-2'-O-methyluridine-3'-pho sphorothioate
  modified_base 2: mod_base = OTHER; note = 2'-deoxy-2'-fluorouridine-3'-phosphorothioate
  modified_base 3: mod_base = OTHER; note = 2'-O-methyladenosine-3'-phosphate
  modified_base 4: mod_base = OTHER; note = 2'-O-methyluridine-3'-phosphate
  modified_base 5: mod_base = OTHER; note = 2'-O-methyladenosine-3'-phosphate
  modified_base 6: mod_base = OTHER; note = 2'-deoxy-2'-fluoroguanosine-3'-phosphate
  modified_base 7: mod_base = OTHER; note = 2'-O-methyladenosine-3'-phosphate
  modified_base 8: mod_base = OTHER; note = 2'-O-methylguanosine-3'-phosphate
  modified_base 9: mod_base = OTHER; note = 2'-O-methylcytidine-3'-phosphate
  modified_base 10: mod_base = OTHER; note = 2'-O-methyladenosine-3'-phosphate
  modified_base 11: mod_base = OTHER; note = 2'-O-methyladenosine-3'-phosphate
  modified_base 12: mod_base = OTHER; note = 2'-O-methylguanosine-3'-phosphate
  modified_base 13: mod_base = OTHER; note = 2'-O-methyladenosine-3'-phosphate
  modified_base 14: mod_base = OTHER; note = 2'-deoxy-2'-fluoroadenosine-3'-phosphate
  modified_base 15: mod_base = OTHER; note = 2'-O-methylcytidine-3'-phosphate
  modified_base 16: mod_base = OTHER; note = 2'-deoxy-2'-fluoroadenosine-3'-phosphate
  modified_base 17: mod_base = OTHER; note = 2'-O-methylcytidine-3'-phosphate
  modified_base 18: mod_base = OTHER; note = 2'-O-methyluridine-3'-phosphate
  modified_base 19: mod_base = OTHER; note = 2'-O-methylguanosine-3'-phosphate
  modified_base 20: mod_base = OTHER; note = 2'-O-methyluridine-3'-phosphate
  modified_base 21: mod_base = OTHER; note = 2'-O-methyluridine-3'-phosphorothioate
  modified_base 22: mod_base = OTHER; note = 2'-O-methyluridine-3'-phosphorothioate
  modified_base 23: mod_base = OTHER; note = 2'-O-methyluridine
ttatagagcaagaacactgtttt

SEQ ID NO: 175 - RNA, 23 nt, synthetic construct
  source 1..23: mol_type = other RNA
  modified_base 1: mod_base = OTHER; note 5'-O-(N-piperidinyl)-2'-O-methyluridine-3'-phosphorothioate
  modified_base 2: mod_base = OTHER; note = 2'-deoxy-2'-fluorouridine-3'-phosphorothioate
  modified_base 3: mod_base = OTHER; note = 2'-O-methyladenosine-3'-phosphate
  modified_base 4: mod_base = OTHER; note = 2'-O-methyluridine-3'-phosphate
  modified_base 5: mod_base = OTHER; note = 2'-O-methyladenosine-3'-phosphate
  modified_base 6: mod_base = OTHER; note = 2'-deoxy-2'-fluoroguanosine-3'-phosphate
  modified_base 7: mod_base = OTHER; note = 2'-O-methyladenosine-3'-phosphate
  modified_base 8: mod_base = OTHER; note = 2'-O-methylguanosine-3'-phosphate
  modified_base 9: mod_base = OTHER; note = 2'-O-methylcytidine-3'-phosphate
  modified_base 10: mod_base = OTHER; note = 2'-O-methyladenosine-3'-phosphate
  modified_base 11: mod_base = OTHER; note = 2'-O-methyladenosine-3'-phosphate
  modified_base 12: mod_base = OTHER; note = 2'-O-methylguanosine-3'-phosphate
  modified_base 13: mod_base = OTHER; note = 2'-O-methyladenosine-3'-phosphate
  modified_base 14: mod_base = OTHER; note = 2'-deoxy-2'-fluoroadenosine-3'-phosphate
  modified_base 15: mod_base = OTHER; note = 2'-O-methylcytidine-3'-phosphate
  modified_base 16: mod_base = OTHER; note = 2'-deoxy-2'-fluoroadenosine-3'-phosphate
  modified_base 17: mod_base = OTHER; note = 2'-O-methylcytidine-3'-phosphate
  modified_base 18: mod_base = OTHER; note = 2'-O-methyluridine-3'-phosphate
  modified_base 19: mod_base = OTHER; note = 2'-O-methylguanosine-3'-phosphate
  modified_base 20: mod_base = OTHER; note = 2'-O-methyluridine-3'-phosphate
  modified_base 21: mod_base = OTHER; note = 2'-O-methyluridine-3'-phosphorothioate
  modified_base 22: mod_base = OTHER; note = 2'-O-methyluridine-3'-phosphorothioate
  modified_base 23: mod_base = OTHER; note = 2'-O-methyluridine
ttatagagcaagaacactgtttt

SEQ ID NO: 176 - RNA, 23 nt, synthetic construct
  source 1..23: mol_type = other RNA
  modified_base 1: mod_base = OTHER; note 5'-O-(N-morpholinyl)-2'-O-methyluridine-3'-phosphorothioate
  modified_base 2: mod_base = OTHER; note = 2'-deoxy-2'-fluorouridine-3'-phosphorothioate
  modified_base 3: mod_base = OTHER; note = 2'-O-methyladenosine-3'-phosphate
  modified_base 4: mod_base = OTHER; note = 2'-O-methyluridine-3'-phosphate
  modified_base 5: mod_base = OTHER; note = 2'-O-methyladenosine-3'-phosphate
  modified_base 6: mod_base = OTHER; note = 2'-deoxy-2'-fluoroguanosine-3'-phosphate
  modified_base 7: mod_base = OTHER; note = 2'-O-methyladenosine-3'-phosphate
  modified_base 8: mod_base = OTHER; note = 2'-O-methylguanosine-3'-phosphate
  modified_base 9: mod_base = OTHER; note = 2'-O-methylcytidine-3'-phosphate
  modified_base 10: mod_base = OTHER; note = 2'-O-methyladenosine-3'-phosphate
  modified_base 11: mod_base = OTHER; note = 2'-O-methyladenosine-3'-phosphate
  modified_base 12: mod_base = OTHER; note = 2'-O-methylguanosine-3'-phosphate
  modified_base 13: mod_base = OTHER; note = 2'-O-methyladenosine-3'-phosphate
  modified_base 14: mod_base = OTHER; note = 2'-deoxy-2'-fluoroadenosine-3'-phosphate
  modified_base 15: mod_base = OTHER; note = 2'-O-methylcytidine-3'-phosphate
  modified_base 16: mod_base = OTHER; note = 2'-deoxy-2'-fluoroadenosine-3'-phosphate
  modified_base 17: mod_base = OTHER; note = 2'-O-methylcytidine-3'-phosphate
  modified_base 18: mod_base = OTHER; note = 2'-O-methyluridine-3'-phosphate
  modified_base 19: mod_base = OTHER; note = 2'-O-methylguanosine-3'-phosphate
  modified_base 20: mod_base = OTHER; note = 2'-O-methyluridine-3'-phosphate
  modified_base 21: mod_base = OTHER; note = 2'-O-methyluridine-3'-phosphorothioate
  modified_base 22: mod_base = OTHER; note = 2'-O-methyluridine-3'-phosphorothioate
  modified_base 23: mod_base = OTHER; note = 2'-O-methyluridine
ttatagagcaagaacactgtttt

SEQ ID NO: 177 - RNA, 21 nt, synthetic construct
  source 1..21: mol_type = other RNA
  modified_base 1: mod_base = OTHER; note 5'-deoxy-5'-morpholino-2'-O-methyluridine-3'-phosphorothioa te
  modified_base 2: mod_base = OTHER; note = 2'-O-methylguanosine-3'-phosphorothioate
  modified_base 3: mod_base = OTHER; note = 2'-deoxy-2'-fluorouridine-3'-phosphate
  modified_base 4: mod_base = OTHER; note = 2'-O-methylguanosine-3'-phosphate
  modified_base 5: mod_base = OTHER; note = 2'-deoxy-2'-fluoroadenosine-3'-phosphate
  modified_base 6: mod_base = OTHER; note = 2'-O-methylcytidine-3'-phosphate
  modified_base 7: mod_base = OTHER; note = 2'-deoxy-2'-fluoroadenosine-3'-phosphate
  modified_base 8: mod_base = OTHER; note = 2'-O-methyladenosine-3'-phosphate
  modified_base 9: mod_base = OTHER; note = 2'-deoxy-2'-fluoroadenosine-3'-phosphate
  modified_base 10: mod_base = OTHER; note = 2'-deoxy-2'-fluorouridine-3'-phosphate
  modified_base 11: mod_base = OTHER; note = 2'-deoxy-2'-fluoroadenosine-3'-phosphate
  modified_base 12: mod_base = OTHER; note = 2'-O-methyluridine-3'-phosphate
  modified_base 13: mod_base = OTHER; note = 2'-deoxy-2'-fluoroguanosine-3'-phosphate
  modified_base 14: mod_base = OTHER; note = 2'-O-methylguanosine-3'-phosphate
  modified_base 15: mod_base = OTHER; note = 2'-deoxy-2'-fluoroguanosine-3'-phosphate
  modified_base 16: mod_base = OTHER; note = 2'-O-methylcytidine-3'-phosphate
  modified_base 17: mod_base = OTHER; note = 2'-deoxy-2'-fluoroadenosine-3'-phosphate
  modified_base 18: mod_base = OTHER; note = 2'-O-methyluridine-3'-phosphate
  modified_base 19: mod_base = OTHER; note = 2'-deoxy-2'-fluorocytidine-3'-phosphate
  modified_base 20: mod_base = OTHER; note = 2'-O-methyladenosine-3'-phosphate
  modified_base 21: mod_base = OTHER; note = 2'-deoxy-2'-fluoroadenosine-3'-phosphate ((2S,4R)-1-[29-[[2-(acetylamino)-2-deoxy-beta-D-galactopyra nosyl]oxy]-14,14-bis[[3-[[3-[[5-[[2-(acetylamino)-2-deoxy-b eta-D-galactopyranosyl]oxy]-1-oxopentyl]amino]propyl]amino] -3-oxopropoxy]methyl]-1,12,19,25-tetraoxo-16-oxa-13,20,24-t riazanonacos-1-yl]-4-hydroxy-2-pyrrolidinyl)methyl ester
tgtgacaaatatgggcatcaa

SEQ ID NO: 178 - RNA, 23 nt, synthetic construct
  source 1..23: mol_type = other RNA
  modified_base 1: mod_base = OTHER; note = 2'-O-methyluridine-3'-phosphorothioate
  modified_base 2: mod_base = OTHER; note = 2'-deoxy-2'-fluorouridine-3'-phosphorothioate
  modified_base 3: mod_base = OTHER; note = 2'-O-methylguanosine-3'-phosphate
  modified_base 4: mod_base = OTHER; note = 2'-deoxy-2'-fluoroadenosine-3'-phosphate
  modified_base 5: mod_base = OTHER; note = 2'-O-methyluridine-3'-phosphate
  modified_base 6: mod_base = OTHER; note = 2'-deoxy-2'-fluoroguanosine-3'-phosphate
  modified_base 7: mod_base = OTHER; note = 2'-O-methylcytidine-3'-phosphate
  modified_base 8: mod_base = OTHER; note = 2'-deoxy-2'-fluorocytidine-3'-phosphate
  modified_base 9: mod_base = OTHER; note = 2'-O-methylcytidine-3'-phosphate
  modified_base 10: mod_base = OTHER; note = 2'-deoxy-2'-fluoroadenosine-3'-phosphate
  modified_base 11: mod_base = OTHER; note = 2'-O-methyluridine-3'-phosphate
  modified_base 12: mod_base = OTHER; note = 2'-O-methyladenosine-3'-phosphate
  modified_base 13: mod_base = OTHER; note = 2'-O-methyluridine-3'-phosphate
  modified_base 14: mod_base = OTHER; note = 2'-deoxy-2'-fluorouridine-3'-phosphate
  modified_base 15: mod_base = OTHER; note = 2'-O-methyluridine-3'-phosphate
  modified_base 16: mod_base = OTHER; note = 2'-deoxy-2'-fluoroguanosine-3'-phosphate
  modified_base 17: mod_base = OTHER; note = 2'-O-methyluridine-3'-phosphate
  modified_base 18: mod_base = OTHER; note = 2'-deoxy-2'-fluorocytidine-3'-phosphate
  modified_base 19: mod_base = OTHER; note = 2'-O-methyladenosine-3'-phosphate
  modified_base 20: mod_base = OTHER; note = 2'-deoxy-2'-fluorocytidine-3'-phosphate
  modified_base 21: mod_base = OTHER; note = 2'-O-methyladenosine-3'-phosphorothioate
  modified_base 22: mod_base = OTHER; note = 2'-O-methyladenosine-3'-phosphorothioate
  modified_base 23: mod_base = OTHER; note = 2'-O-methyladenosine
ttgatgcccatatttgtcacaaa

SEQ ID NO: 179 - RNA, 21 nt, synthetic construct
  source 1..21: mol_type = other RNA
  modified_base 1: mod_base = OTHER; note = 2'-O-methyluridine-3'-phosphorothioate
  modified_base 2: mod_base = OTHER; note = 2'-O-methylguanosine-3'-phosphorothioate
  modified_base 3: mod_base = OTHER; note = 2'-deoxy-2'-fluorouridine-3'-phosphate
  modified_base 4: mod_base = OTHER; note = 2'-O-methylguanosine-3'-phosphate
  modified_base 5: mod_base = OTHER; note = 2'-deoxy-2'-fluoroadenosine-3'-phosphate
  modified_base 6: mod_base = OTHER; note = 2'-O-methylcytidine-3'-phosphate
  modified_base 7: mod_base = OTHER; note = 2'-deoxy-2'-fluoroadenosine-3'-phosphate
  modified_base 8: mod_base = OTHER; note = 2'-O-methyladenosine-3'-phosphate
  modified_base 9: mod_base = OTHER; note = 2'-deoxy-2'-fluoroadenosine-3'-phosphate
  modified_base 10: mod_base = OTHER; note = 2'-deoxy-2'-fluorouridine-3'-phosphate
  modified_base 11: mod_base = OTHER; note = 2'-deoxy-2'-fluoroadenosine-3'-phosphate
  modified_base 12: mod_base = OTHER; note = 2'-O-methyluridine-3'-phosphate
  modified_base 13: mod_base = OTHER; note = 2'-deoxy-2'-fluoroguanosine-3'-phosphate
  modified_base 14: mod_base = OTHER; note = 2'-O-methylguanosine-3'-phosphate
  modified_base 15: mod_base = OTHER; note = 2'-deoxy-2'-fluoroguanosine-3'-phosphate
  modified_base 16: mod_base = OTHER; note = 2'-O-methylcytidine-3'-phosphate
  modified_base 17: mod_base = OTHER; note = 2'-deoxy-2'-fluoroadenosine-3'-phosphate
  modified_base 18: mod_base = OTHER; note = 2'-O-methyluridine-3'-phosphate
  modified_base 19: mod_base = OTHER; note = 2'-deoxy-2'-fluorocytidine-3'-phosphate
  modified_base 20: mod_base = OTHER; note = 2'-O-methyladenosine-3'-phosphate
  modified_base 21: mod_base = OTHER; note = 2'-deoxy-2'-fluoroadenosine-3'-phosphate ((2S,4R)-1-[29-[[2-(acetylamino)-2-deoxy-beta-D-galactopyra nosyl]oxy]-14,14-bis[[3-[[3-[[5-[[2-(acetylamino)-2-deoxy-b eta-D-galactopyranosyl]oxy]-1-oxopentyl]amino]propyl]amino] -3-oxopropoxy]methyl]-1,12,19,25-tetraoxo-16-oxa-13,20,24-t riazanonacos-1-yl]-4-hydroxy-2-pyrrolidinyl)methyl ester
tgtgacaaatatgggcatcaa

SEQ ID NO: 180 - RNA, 23 nt, synthetic construct
  source 1..23: mol_type = other RNA
  modified_base 1: mod_base = OTHER; note = 2'-O-methyluridine-3'-phosphorothioate
  modified_base 2: mod_base = OTHER; note = 2'-deoxy-2'-fluorouridine-3'-phosphorothioate
  modified_base 3: mod_base = OTHER; note = 2'-O-methylguanosine-3'-phosphate
  modified_base 4: mod_base = OTHER; note = 2'-deoxy-2'-fluoroadenosine-3'-phosphate
  modified_base 5: mod_base = OTHER; note = 2'-O-methyluridine-3'-phosphate
  modified_base 6: mod_base = OTHER; note = 2'-deoxy-2'-fluoroguanosine-3'-phosphate
  modified_base 7: mod_base = OTHER; note = 2'-O-methylcytidine-3'-phosphate
  modified_base 8: mod_base = OTHER; note = 2'-deoxy-2'-fluorocytidine-3'-phosphate
  modified_base 9: mod_base = OTHER; note = 2'-O-methylcytidine-3'-phosphate
  modified_base 10: mod_base = OTHER; note = 2'-deoxy-2'-fluoroadenosine-3'-phosphate
  modified_base 11: mod_base = OTHER; note = 2'-O-methyluridine-3'-phosphate
  modified_base 12: mod_base = OTHER; note = 2'-O-methyladenosine-3'-phosphate
  modified_base 13: mod_base = OTHER; note = 2'-O-methyluridine-3'-phosphate
  modified_base 14: mod_base = OTHER; note = 2'-deoxy-2'-fluorouridine-3'-phosphate
  modified_base 15: mod_base = OTHER; note = 2'-O-methyluridine-3'-phosphate
  modified_base 16: mod_base = OTHER; note = 2'-deoxy-2'-fluoroguanosine-3'-phosphate
  modified_base 17: mod_base = OTHER; note = 2'-O-methyluridine-3'-phosphate
  modified_base 18: mod_base = OTHER; note = 2'-deoxy-2'-fluorocytidine-3'-phosphate
  modified_base 19: mod_base = OTHER; note = 2'-O-methyladenosine-3'-phosphate
  modified_base 20: mod_base = OTHER; note = 2'-deoxy-2'-fluorocytidine-3'-phosphate
  modified_base 21: mod_base = OTHER; note = 2'-O-methyladenosine-3'-phosphorothioate
  modified_base 22: mod_base = OTHER; note = 2'-O-methyladenosine-3'-phosphorothioate
  modified_base 23: mod_base = OTHER; note = 2'-O-methyladenosine
ttgatgcccatatttgtcacaaa

SEQ ID NO: 181 - RNA, 21 nt, synthetic construct
  source 1..21: mol_type = other RNA
  modified_base 1: mod_base = OTHER; note = 2'-O-methyluridine-3'-phosphorothioate
  modified_base 2: mod_base = OTHER; note = 2'-O-methylguanosine-3'-phosphorothioate
  modified_base 3: mod_base = OTHER; note = 2'-deoxy-2'-fluorouridine-3'-phosphate
  modified_base 4: mod_base = OTHER; note = 2'-O-methylguanosine-3'-phosphate
  modified_base 5: mod_base = OTHER; note = 2'-deoxy-2'-fluoroadenosine-3'-phosphate
  modified_base 6: mod_base = OTHER; note = 2'-O-methylcytidine-3'-phosphate
  modified_base 7: mod_base = OTHER; note = 2'-deoxy-2'-fluoroadenosine-3'-phosphate
  modified_base 8: mod_base = OTHER; note = 2'-O-methyladenosine-3'-phosphate
  modified_base 9: mod_base = OTHER; note = 2'-deoxy-2'-fluoroadenosine-3'-phosphate
  modified_base 10: mod_base = OTHER; note = 2'-deoxy-2'-fluorouridine-3'-phosphate
  modified_base 11: mod_base = OTHER; note = 2'-deoxy-2'-fluoroadenosine-3'-phosphate
  modified_base 12: mod_base = OTHER; note = 2'-O-methyluridine-3'-phosphate
  modified_base 13: mod_base = OTHER; note = 2'-deoxy-2'-fluoroguanosine-3'-phosphate
  modified_base 14: mod_base = OTHER; note = 2'-O-methylguanosine-3'-phosphate
  modified_base 15: mod_base = OTHER; note = 2'-deoxy-2'-fluoroguanosine-3'-phosphate
  modified_base 16: mod_base = OTHER; note = 2'-O-methylcytidine-3'-phosphate
  modified_base 17: mod_base = OTHER; note = 2'-deoxy-2'-fluoroadenosine-3'-phosphate
  modified_base 18: mod_base = OTHER; note = 2'-O-methyluridine-3'-phosphate
  modified_base 19: mod_base = OTHER; note = 2'-deoxy-2'-fluorocytidine-3'-phosphate
  modified_base 20: mod_base = OTHER; note = 2'-O-methyladenosine-3'-phosphate
  modified_base 21: mod_base = OTHER; note = 2'-deoxy-2'-fluoroadenosine-3'-phosphate ((2S,4R)-1-[29-[[2-(acetylamino)-2-deoxy-beta-D-galactopyra nosyl]oxy]-14,14-bis[[3-[[3-[[5-[[2-(acetylamino)-2-deoxy-b eta-D-galactopyranosyl]oxy]-1-oxopentyl]amino]propyl]amino] -3-oxopropoxy]methyl]-1,12,19,25-tetraoxo-16-oxa-13,20,24-t riazanonacos-1-yl]-4-hydroxy-2-pyrrolidinyl)methyl ester
tgtgacaaatatgggcatcaa

SEQ ID NO: 182 - RNA, 23 nt, synthetic construct
  source 1..23: mol_type = other RNA
  modified_base 1: mod_base = OTHER; note 5'-deoxy-5'-morpholino-2'-O-methyluridine-3'-phosphorothioa te
  modified_base 2: mod_base = OTHER; note = 2'-deoxy-2'-fluorouridine-3'-phosphorothioate
  modified_base 3: mod_base = OTHER; note = 2'-O-methylguanosine-3'-phosphate
  modified_base 4: mod_base = OTHER; note = 2'-deoxy-2'-fluoroadenosine-3'-phosphate
  modified_base 5: mod_base = OTHER; note = 2'-O-methyluridine-3'-phosphate
  modified_base 6: mod_base = OTHER; note = 2'-deoxy-2'-fluoroguanosine-3'-phosphate
  modified_base 7: mod_base = OTHER; note = 2'-O-methylcytidine-3'-phosphate
  modified_base 8: mod_base = OTHER; note = 2'-deoxy-2'-fluorocytidine-3'-phosphate
  modified_base 9: mod_base = OTHER; note = 2'-O-methylcytidine-3'-phosphate
  modified_base 10: mod_base = OTHER; note = 2'-deoxy-2'-fluoroadenosine-3'-phosphate
  modified_base 11: mod_base = OTHER; note = 2'-O-methyluridine-3'-phosphate
  modified_base 12: mod_base = OTHER; note = 2'-O-methyladenosine-3'-phosphate
  modified_base 13: mod_base = OTHER; note = 2'-O-methyluridine-3'-phosphate
  modified_base 14: mod_base = OTHER; note = 2'-deoxy-2'-fluorouridine-3'-phosphate
  modified_base 15: mod_base = OTHER; note = 2'-O-methyluridine-3'-phosphate
  modified_base 16: mod_base = OTHER; note = 2'-deoxy-2'-fluoroguanosine-3'-phosphate
  modified_base 17: mod_base = OTHER; note = 2'-O-methyluridine-3'-phosphate
  modified_base 18: mod_base = OTHER; note = 2'-deoxy-2'-fluorocytidine-3'-phosphate
  modified_base 19: mod_base = OTHER; note = 2'-O-methyladenosine-3'-phosphate
  modified_base 20: mod_base = OTHER; note = 2'-deoxy-2'-fluorocytidine-3'-phosphate
  modified_base 21: mod_base = OTHER; note = 2'-O-methyladenosine-3'-phosphorothioate
  modified_base 22: mod_base = OTHER; note = 2'-O-methyladenosine-3'-phosphorothioate
  modified_base 23: mod_base = OTHER; note = 2'-O-methyladenosine
ttgatgcccatatttgtcacaaa

SEQ ID NO: 183 - RNA, 21 nt, synthetic construct
  source 1..21: mol_type = other RNA
  modified_base 1: mod_base = OTHER; note 5'-deoxy-5'-(N-morpholinylmethyl)-2'-O-methyluridine-3'-pho sphorothioate
  modified_base 2: mod_base = OTHER; note = 2'-O-methylguanosine-3'-phosphorothioate
  modified_base 3: mod_base = OTHER; note = 2'-deoxy-2'-fluorouridine-3'-phosphate
  modified_base 4: mod_base = OTHER; note = 2'-O-methylguanosine-3'-phosphate
  modified_base 5: mod_base = OTHER; note = 2'-deoxy-2'-fluoroadenosine-3'-phosphate
  modified_base 6: mod_base = OTHER; note = 2'-O-methylcytidine-3'-phosphate
  modified_base 7: mod_base = OTHER; note = 2'-deoxy-2'-fluoroadenosine-3'-phosphate
  modified_base 8: mod_base = OTHER; note = 2'-O-methyladenosine-3'-phosphate
  modified_base 9: mod_base = OTHER; note = 2'-deoxy-2'-fluoroadenosine-3'-phosphate
  modified_base 10: mod_base = OTHER; note = 2'-deoxy-2'-fluorouridine-3'-phosphate
  modified_base 11: mod_base = OTHER; note = 2'-deoxy-2'-fluoroadenosine-3'-phosphate
  modified_base 12: mod_base = OTHER; note = 2'-O-methyluridine-3'-phosphate
  modified_base 13: mod_base = OTHER; note = 2'-deoxy-2'-fluoroguanosine-3'-phosphate
  modified_base 14: mod_base = OTHER; note = 2'-O-methylguanosine-3'-phosphate
  modified_base 15: mod_base = OTHER; note = 2'-deoxy-2'-fluoroguanosine-3'-phosphate
  modified_base 16: mod_base = OTHER; note = 2'-O-methylcytidine-3'-phosphate
  modified_base 17: mod_base = OTHER; note = 2'-deoxy-2'-fluoroadenosine-3'-phosphate
  modified_base 18: mod_base = OTHER; note = 2'-O-methyluridine-3'-phosphate
  modified_base 19: mod_base = OTHER; note = 2'-deoxy-2'-fluorocytidine-3'-phosphate
  modified_base 20: mod_base = OTHER; note = 2'-O-methyladenosine-3'-phosphate
  modified_base 21: mod_base = OTHER; note = 2'-deoxy-2'-fluoroadenosine-3'-phosphate ((2S,4R)-1-[29-[[2-(acetylamino)-2-deoxy-beta-D-galactopyra nosyl]oxy]-14,14-bis[[3-[[3-[[5-[[2-(acetylamino)-2-deoxy-b eta-D-galactopyranosyl]oxy]-1-oxopentyl]amino]propyl]amino] -3-oxopropoxy]methyl]-1,12,19,25-tetraoxo-16-oxa-13,20,24-t riazanonacos-1-yl]-4-hydroxy-2-pyrrolidinyl)methyl ester
tgtgacaaatatgggcatcaa

SEQ ID NO: 184 - RNA, 23 nt, synthetic construct
  source 1..23: mol_type = other RNA
  modified_base 1: mod_base = OTHER; note = 2'-O-methyluridine-3'-phosphorothioate
  modified_base 2: mod_base = OTHER; note = 2'-deoxy-2'-fluorouridine-3'-phosphorothioate
  modified_base 3: mod_base = OTHER; note = 2'-O-methylguanosine-3'-phosphate
  modified_base 4: mod_base = OTHER; note = 2'-deoxy-2'-fluoroadenosine-3'-phosphate
  modified_base 5: mod_base = OTHER; note = 2'-O-methyluridine-3'-phosphate
  modified_base 6: mod_base = OTHER; note = 2'-deoxy-2'-fluoroguanosine-3'-phosphate
  modified_base 7: mod_base = OTHER; note = 2'-O-methylcytidine-3'-phosphate
  modified_base 8: mod_base = OTHER; note = 2'-deoxy-2'-fluorocytidine-3'-phosphate
  modified_base 9: mod_base = OTHER; note = 2'-O-methylcytidine-3'-phosphate
  modified_base 10: mod_base = OTHER; note = 2'-deoxy-2'-fluoroadenosine-3'-phosphate
  modified_base 11: mod_base = OTHER; note = 2'-O-methyluridine-3'-phosphate
  modified_base 12: mod_base = OTHER; note = 2'-O-methyladenosine-3'-phosphate
  modified_base 13: mod_base = OTHER; note = 2'-O-methyluridine-3'-phosphate
  modified_base 14: mod_base = OTHER; note = 2'-deoxy-2'-fluorouridine-3'-phosphate
  modified_base 15: mod_base = OTHER; note = 2'-O-methyluridine-3'-phosphate
  modified_base 16: mod_base = OTHER; note = 2'-deoxy-2'-fluoroguanosine-3'-phosphate
  modified_base 17: mod_base = OTHER; note = 2'-O-methyluridine-3'-phosphate
  modified_base 18: mod_base = OTHER; note = 2'-deoxy-2'-fluorocytidine-3'-phosphate
  modified_base 19: mod_base = OTHER; note = 2'-O-methyladenosine-3'-phosphate
  modified_base 20: mod_base = OTHER; note = 2'-deoxy-2'-fluorocytidine-3'-phosphate
  modified_base 21: mod_base = OTHER; note = 2'-O-methyladenosine-3'-phosphorothioate
  modified_base 22: mod_base = OTHER; note = 2'-O-methyladenosine-3'-phosphorothioate
  modified_base 23: mod_base = OTHER; note = 2'-O-methyladenosine
ttgatgcccatatttgtcacaaa

SEQ ID NO: 185 - RNA, 21 nt, synthetic construct
  source 1..21: mol_type = other RNA
  modified_base 1: mod_base = OTHER; note 5'-O-(N-piperidinyl)-2'-O-methyluridine-3'-phosphorothioate
  modified_base 2: mod_base = OTHER; note = 2'-O-methylguanosine-3'-phosphorothioate
  modified_base 3: mod_base = OTHER; note = 2'-deoxy-2'-fluorouridine-3'-phosphate
  modified_base 4: mod_base = OTHER; note = 2'-O-methylguanosine-3'-phosphate
  modified_base 5: mod_base = OTHER; note = 2'-deoxy-2'-fluoroadenosine-3'-phosphate
  modified_base 6: mod_base = OTHER; note = 2'-O-methylcytidine-3'-phosphate
  modified_base 7: mod_base = OTHER; note = 2'-deoxy-2'-fluoroadenosine-3'-phosphate
  modified_base 8: mod_base = OTHER; note = 2'-O-methyladenosine-3'-phosphate
  modified_base 9: mod_base = OTHER; note = 2'-deoxy-2'-fluoroadenosine-3'-phosphate
  modified_base 10: mod_base = OTHER; note = 2'-deoxy-2'-fluorouridine-3'-phosphate
  modified_base 11: mod_base = OTHER; note = 2'-deoxy-2'-fluoroadenosine-3'-phosphate
  modified_base 12: mod_base = OTHER; note = 2'-O-methyluridine-3'-phosphate
  modified_base 13: mod_base = OTHER; note = 2'-deoxy-2'-fluoroguanosine-3'-phosphate
  modified_base 14: mod_base = OTHER; note = 2'-O-methylguanosine-3'-phosphate
  modified_base 15: mod_base = OTHER; note = 2'-deoxy-2'-fluoroguanosine-3'-phosphate
  modified_base 16: mod_base = OTHER; note = 2'-O-methylcytidine-3'-phosphate
  modified_base 17: mod_base = OTHER; note = 2'-deoxy-2'-fluoroadenosine-3'-phosphate
  modified_base 18: mod_base = OTHER; note = 2'-O-methyluridine-3'-phosphate
  modified_base 19: mod_base = OTHER; note = 2'-deoxy-2'-fluorocytidine-3'-phosphate
  modified_base 20: mod_base = OTHER; note = 2'-O-methyladenosine-3'-phosphate
  modified_base 21: mod_base = OTHER; note = 2'-deoxy-2'-fluoroadenosine-3'-phosphate ((2S,4R)-1-[29-[[2-(acetylamino)-2-deoxy-beta-D-galactopyra nosyl]oxy]-14,14-bis[[3-[[3-[[5-[[2-(acetylamino)-2-deoxy-b eta-D-galactopyranosyl]oxy]-1-oxopentyl]amino]propyl]amino] -3-oxopropoxy]methyl]-1,12,19,25-tetraoxo-16-oxa-13,20,24-t riazanonacos-1-yl]-4-hydroxy-2-pyrrolidinyl)methyl ester
tgtgacaaatatgggcatcaa

SEQ ID NO: 186 - RNA, 23 nt, synthetic construct
  source 1..23: mol_type = other RNA
  modified_base 1: mod_base = OTHER; note = 2'-O-methyluridine-3'-phosphorothioate
  modified_base 2: mod_base = OTHER; note = 2'-deoxy-2'-fluorouridine-3'-phosphorothioate
  modified_base 3: mod_base = OTHER; note = 2'-O-methylguanosine-3'-phosphate
  modified_base 4: mod_base = OTHER; note = 2'-deoxy-2'-fluoroadenosine-3'-phosphate
  modified_base 5: mod_base = OTHER; note = 2'-O-methyluridine-3'-phosphate
  modified_base 6: mod_base = OTHER; note = 2'-deoxy-2'-fluoroguanosine-3'-phosphate
  modified_base 7: mod_base = OTHER; note = 2'-O-methylcytidine-3'-phosphate
  modified_base 8: mod_base = OTHER; note = 2'-deoxy-2'-fluorocytidine-3'-phosphate
  modified_base 9: mod_base = OTHER; note = 2'-O-methylcytidine-3'-phosphate
  modified_base 10: mod_base = OTHER; note = 2'-deoxy-2'-fluoroadenosine-3'-phosphate
  modified_base 11: mod_base = OTHER; note = 2'-O-methyluridine-3'-phosphate
  modified_base 12: mod_base = OTHER; note = 2'-O-methyladenosine-3'-phosphate
  modified_base 13: mod_base = OTHER; note = 2'-O-methyluridine-3'-phosphate
  modified_base 14: mod_base = OTHER; note = 2'-deoxy-2'-fluorouridine-3'-phosphate
  modified_base 15: mod_base = OTHER; note = 2'-O-methyluridine-3'-phosphate
  modified_base 16: mod_base = OTHER; note = 2'-deoxy-2'-fluoroguanosine-3'-phosphate
  modified_base 17: mod_base = OTHER; note = 2'-O-methyluridine-3'-phosphate
  modified_base 18: mod_base = OTHER; note = 2'-deoxy-2'-fluorocytidine-3'-phosphate
  modified_base 19: mod_base = OTHER; note = 2'-O-methyladenosine-3'-phosphate
  modified_base 20: mod_base = OTHER; note = 2'-deoxy-2'-fluorocytidine-3'-phosphate
  modified_base 21: mod_base = OTHER; note = 2'-O-methyladenosine-3'-phosphorothioate
  modified_base 22: mod_base = OTHER; note = 2'-O-methyladenosine-3'-phosphorothioate
  modified_base 23: mod_base = OTHER; note = 2'-O-methyladenosine
ttgatgcccatatttgtcacaaa

SEQ ID NO: 187 - RNA, 21 nt, synthetic construct
  source 1..21: mol_type = other RNA
  modified_base 1: mod_base = OTHER; note 5'-O-(N-morpholinyl)-2'-O-methyluridine-3'-phosphorothioate
  modified_base 2: mod_base = OTHER; note = 2'-O-methylguanosine-3'-phosphorothioate
  modified_base 3: mod_base = OTHER; note = 2'-deoxy-2'-fluorouridine-3'-phosphate
  modified_base 4: mod_base = OTHER; note = 2'-O-methylguanosine-3'-phosphate
  modified_base 5: mod_base = OTHER; note = 2'-deoxy-2'-fluoroadenosine-3'-phosphate
  modified_base 6: mod_base = OTHER; note = 2'-O-methylcytidine-3'-phosphate
  modified_base 7: mod_base = OTHER; note = 2'-deoxy-2'-fluoroadenosine-3'-phosphate
  modified_base 8: mod_base = OTHER; note = 2'-O-methyladenosine-3'-phosphate
  modified_base 9: mod_base = OTHER; note = 2'-deoxy-2'-fluoroadenosine-3'-phosphate
  modified_base 10: mod_base = OTHER; note = 2'-deoxy-2'-fluorouridine-3'-phosphate
  modified_base 11: mod_base = OTHER; note = 2'-deoxy-2'-fluoroadenosine-3'-phosphate
  modified_base 12: mod_base = OTHER; note = 2'-O-methyluridine-3'-phosphate
  modified_base 13: mod_base = OTHER; note = 2'-deoxy-2'-fluoroguanosine-3'-phosphate
  modified_base 14: mod_base = OTHER; note = 2'-O-methylguanosine-3'-phosphate
  modified_base 15: mod_base = OTHER; note = 2'-deoxy-2'-fluoroguanosine-3'-phosphate
  modified_base 16: mod_base = OTHER; note = 2'-O-methylcytidine-3'-phosphate
  modified_base 17: mod_base = OTHER; note = 2'-deoxy-2'-fluoroadenosine-3'-phosphate
  modified_base 18: mod_base = OTHER; note = 2'-O-methyluridine-3'-phosphate
  modified_base 19: mod_base = OTHER; note = 2'-deoxy-2'-fluorocytidine-3'-phosphate
  modified_base 20: mod_base = OTHER; note = 2'-O-methyladenosine-3'-phosphate
  modified_base 21: mod_base = OTHER; note = 2'-deoxy-2'-fluoroadenosine-3'-phosphate ((2S,4R)-1-[29-[[2-(acetylamino)-2-deoxy-beta-D-galactopyra nosyl]oxy]-14,14-bis[[3-[[3-[[5-[[2-(acetylamino)-2-deoxy-b eta-D-galactopyranosyl]oxy]-1-oxopentyl]amino]propyl]amino] -3-oxopropoxy]methyl]-1,12,19,25-tetraoxo-16-oxa-13,20,24-t riazanonacos-1-yl]-4-hydroxy-2-pyrrolidinyl)methyl ester
tgtgacaaatatgggcatcaa

SEQ ID NO: 188 - RNA, 23 nt, synthetic construct
  source 1..23: mol_type = other RNA
  modified_base 1: mod_base = OTHER; note = 2'-O-methyluridine-3'-phosphorothioate
  modified_base 2: mod_base = OTHER; note = 2'-deoxy-2'-fluorouridine-3'-phosphorothioate
  modified_base 3: mod_base = OTHER; note = 2'-O-methylguanosine-3'-phosphate
  modified_base 4: mod_base = OTHER; note = 2'-deoxy-2'-fluoroadenosine-3'-phosphate
  modified_base 5: mod_base = OTHER; note = 2'-O-methyluridine-3'-phosphate
  modified_base 6: mod_base = OTHER; note = 2'-deoxy-2'-fluoroguanosine-3'-phosphate
  modified_base 7: mod_base = OTHER; note = 2'-O-methylcytidine-3'-phosphate
  modified_base 8: mod_base = OTHER; note = 2'-deoxy-2'-fluorocytidine-3'-phosphate
  modified_base 9: mod_base = OTHER; note = 2'-O-methylcytidine-3'-phosphate
  modified_base 10: mod_base = OTHER; note = 2'-deoxy-2'-fluoroadenosine-3'-phosphate
  modified_base 11: mod_base = OTHER; note = 2'-O-methyluridine-3'-phosphate
  modified_base 12: mod_base = OTHER; note = 2'-O-methyladenosine-3'-phosphate
  modified_base 13: mod_base = OTHER; note = 2'-O-methyluridine-3'-phosphate
  modified_base 14: mod_base = OTHER; note = 2'-deoxy-2'-fluorouridine-3'-phosphate
  modified_base 15: mod_base = OTHER; note = 2'-O-methyluridine-3'-phosphate
  modified_base 16: mod_base = OTHER; note = 2'-deoxy-2'-fluoroguanosine-3'-phosphate
  modified_base 17: mod_base = OTHER; note = 2'-O-methyluridine-3'-phosphate
  modified_base 18: mod_base = OTHER; note = 2'-deoxy-2'-fluorocytidine-3'-phosphate
  modified_base 19: mod_base = OTHER; note = 2'-O-methyladenosine-3'-phosphate
  modified_base 20: mod_base = OTHER; note = 2'-deoxy-2'-fluorocytidine-3'-phosphate
  modified_base 21: mod_base = OTHER; note = 2'-O-methyladenosine-3'-phosphorothioate
  modified_base 22: mod_base = OTHER; note = 2'-O-methyladenosine-3'-phosphorothioate
  modified_base 23: mod_base = OTHER; note = 2'-O-methyladenosine
ttgatgcccatatttgtcacaaa

SEQ ID NO: 189 - RNA, 21 nt, synthetic construct
  source 1..21: mol_type = other RNA
  modified_base 1: mod_base = OTHER; note = 2'-O-methyluridine-3'-phosphorothioate
  modified_base 2: mod_base = OTHER; note = 2'-O-methylguanosine-3'-phosphorothioate
  modified_base 3: mod_base = OTHER; note = 2'-deoxy-2'-fluorouridine-3'-phosphate
  modified_base 4: mod_base = OTHER; note = 2'-O-methylguanosine-3'-phosphate
  modified_base 5: mod_base = OTHER; note = 2'-deoxy-2'-fluoroadenosine-3'-phosphate
  modified_base 6: mod_base = OTHER; note = 2'-O-methylcytidine-3'-phosphate
  modified_base 7: mod_base = OTHER; note = 2'-deoxy-2'-fluoroadenosine-3'-phosphate
  modified_base 8: mod_base = OTHER; note = 2'-O-methyladenosine-3'-phosphate
  modified_base 9: mod_base = OTHER; note = 2'-deoxy-2'-fluoroadenosine-3'-phosphate
  modified_base 10: mod_base = OTHER; note = 2'-deoxy-2'-fluorouridine-3'-phosphate
  modified_base 11: mod_base = OTHER; note = 2'-deoxy-2'-fluoroadenosine-3'-phosphate
  modified_base 12: mod_base = OTHER; note = 2'-O-methyluridine-3'-phosphate
  modified_base 13: mod_base = OTHER; note = 2'-deoxy-2'-fluoroguanosine-3'-phosphate
  modified_base 14: mod_base = OTHER; note = 2'-O-methylguanosine-3'-phosphate
  modified_base 15: mod_base = OTHER; note = 2'-deoxy-2'-fluoroguanosine-3'-phosphate
  modified_base 16: mod_base = OTHER; note = 2'-O-methylcytidine-3'-phosphate
  modified_base 17: mod_base = OTHER; note = 2'-deoxy-2'-fluoroadenosine-3'-phosphate
  modified_base 18: mod_base = OTHER; note = 2'-O-methyluridine-3'-phosphate
  modified_base 19: mod_base = OTHER; note = 2'-deoxy-2'-fluorocytidine-3'-phosphate
  modified_base 20: mod_base = OTHER; note = 2'-O-methyladenosine-3'-phosphate
  modified_base 21: mod_base = OTHER; note = 2'-deoxy-2'-fluoroadenosine-3'-phosphate ((2S,4R)-1-[29-[[2-(acetylamino)-2-deoxy-beta-D-galactopyra nosyl]oxy]-14,14-bis[[3-[[3-[[5-[[2-(acetylamino)-2-deoxy-b eta-D-galactopyranosyl]oxy]-1-oxopentyl]amino]propyl]amino] -3-oxopropoxy]methyl]-1,12,19,25-tetraoxo-16-oxa-13,20,24-t riazanonacos-1-yl]-4-hydroxy-2-pyrrolidinyl)methyl ester
tgtgacaaatatgggcatcaa

SEQ ID NO: 190 - RNA, 23 nt, synthetic construct
  source 1..23: mol_type = other RNA
  modified_base 1: mod_base = OTHER; note 5'-deoxy-5'-(N-morpholinylmethyl)-2'-O-methyluridine-3'-pho sphorothioate
  modified_base 2: mod_base = OTHER; note = 2'-deoxy-2'-fluorouridine-3'-phosphorothioate
  modified_base 3: mod_base = OTHER; note = 2'-O-methylguanosine-3'-phosphate
  modified_base 4: mod_base = OTHER; note = 2'-deoxy-2'-fluoroadenosine-3'-phosphate
  modified_base 5: mod_base = OTHER; note = 2'-O-methyluridine-3'-phosphate
  modified_base 6: mod_base = OTHER; note = 2'-deoxy-2'-fluoroguanosine-3'-phosphate
  modified_base 7: mod_base = OTHER; note = 2'-O-methylcytidine-3'-phosphate
  modified_base 8: mod_base = OTHER; note = 2'-deoxy-2'-fluorocytidine-3'-phosphate
  modified_base 9: mod_base = OTHER; note = 2'-O-methylcytidine-3'-phosphate
  modified_base 10: mod_base = OTHER; note = 2'-deoxy-2'-fluoroadenosine-3'-phosphate
  modified_base 11: mod_base = OTHER; note = 2'-O-methyluridine-3'-phosphate
  modified_base 12: mod_base = OTHER; note = 2'-O-methyladenosine-3'-phosphate
  modified_base 13: mod_base = OTHER; note = 2'-O-methyluridine-3'-phosphate
  modified_base 14: mod_base = OTHER; note = 2'-deoxy-2'-fluorouridine-3'-phosphate
  modified_base 15: mod_base = OTHER; note = 2'-O-methyluridine-3'-phosphate
  modified_base 16: mod_base = OTHER; note = 2'-deoxy-2'-fluoroguanosine-3'-phosphate
  modified_base 17: mod_base = OTHER; note = 2'-O-methyluridine-3'-phosphate
  modified_base 18: mod_base = OTHER; note = 2'-deoxy-2'-fluorocytidine-3'-phosphate
  modified_base 19: mod_base = OTHER; note = 2'-O-methyladenosine-3'-phosphate
  modified_base 20: mod_base = OTHER; note = 2'-deoxy-2'-fluorocytidine-3'-phosphate
  modified_base 21: mod_base = OTHER; note = 2'-O-methyladenosine-3'-phosphorothioate
  modified_base 22: mod_base = OTHER; note = 2'-O-methyladenosine-3'-phosphorothioate
  modified_base 23: mod_base = OTHER; note = 2'-O-methyladenosine
ttgatgcccatatttgtcacaaa

SEQ ID NO: 191 - RNA, 21 nt, synthetic construct
  source 1..21: mol_type = other RNA
  modified_base 1: mod_base = OTHER; note = 2'-O-methyluridine-3'-phosphorothioate
  modified_base 2: mod_base = OTHER; note = 2'-O-methylguanosine-3'-phosphorothioate
  modified_base 3: mod_base = OTHER; note = 2'-deoxy-2'-fluorouridine-3'-phosphate
  modified_base 4: mod_base = OTHER; note = 2'-O-methylguanosine-3'-phosphate
  modified_base 5: mod_base = OTHER; note = 2'-deoxy-2'-fluoroadenosine-3'-phosphate
  modified_base 6: mod_base = OTHER; note = 2'-O-methylcytidine-3'-phosphate
  modified_base 7: mod_base = OTHER; note = 2'-deoxy-2'-fluoroadenosine-3'-phosphate
  modified_base 8: mod_base = OTHER; note = 2'-O-methyladenosine-3'-phosphate
  modified_base 9: mod_base = OTHER; note = 2'-deoxy-2'-fluoroadenosine-3'-phosphate
  modified_base 10: mod_base = OTHER; note = 2'-deoxy-2'-fluorouridine-3'-phosphate
  modified_base 11: mod_base = OTHER; note = 2'-deoxy-2'-fluoroadenosine-3'-phosphate
  modified_base 12: mod_base = OTHER; note = 2'-O-methyluridine-3'-phosphate
  modified_base 13: mod_base = OTHER; note = 2'-deoxy-2'-fluoroguanosine-3'-phosphate
  modified_base 14: mod_base = OTHER; note = 2'-O-methylguanosine-3'-phosphate
  modified_base 15: mod_base = OTHER; note = 2'-deoxy-2'-fluoroguanosine-3'-phosphate
  modified_base 16: mod_base = OTHER; note = 2'-O-methylcytidine-3'-phosphate
  modified_base 17: mod_base = OTHER; note = 2'-deoxy-2'-fluoroadenosine-3'-phosphate
  modified_base 18: mod_base = OTHER; note = 2'-O-methyluridine-3'-phosphate
  modified_base 19: mod_base = OTHER; note = 2'-deoxy-2'-fluorocytidine-3'-phosphate
  modified_base 20: mod_base = OTHER; note = 2'-O-methyladenosine-3'-phosphate
  modified_base 21: mod_base = OTHER; note = 2'-deoxy-2'-fluoroadenosine-3'-phosphate ((2S,4R)-1-[29-[[2-(acetylamino)-2-deoxy-beta-D-galactopyra nosyl]oxy]-14,14-bis[[3-[[3-[[5-[[2-(acetylamino)-2-deoxy-b eta-D-galactopyranosyl]oxy]-1-oxopentyl]amino]propyl]amino] -3-oxopropoxy]methyl]-1,12,19,25-tetraoxo-16-oxa-13,20,24-t riazanonacos-1-yl]-4-hydroxy-2-pyrrolidinyl)methyl ester
tgtgacaaatatgggcatcaa

SEQ ID NO: 192 - RNA, 23 nt, synthetic construct
  source 1..23: mol_type = other RNA
  modified_base 1: mod_base = OTHER; note 5'-O-(N-piperidinyl)-2'-O-methyluridine-3'-phosphorothioate
  modified_base 2: mod_base = OTHER; note = 2'-deoxy-2'-fluorouridine-3'-phosphorothioate
  modified_base 3: mod_base = OTHER; note = 2'-O-methylguanosine-3'-phosphate
  modified_base 4: mod_base = OTHER; note = 2'-deoxy-2'-fluoroadenosine-3'-phosphate
  modified_base 5: mod_base = OTHER; note = 2'-O-methyluridine-3'-phosphate
  modified_base 6: mod_base = OTHER; note = 2'-deoxy-2'-fluoroguanosine-3'-phosphate
  modified_base 7: mod_base = OTHER; note = 2'-O-methylcytidine-3'-phosphate
  modified_base 8: mod_base = OTHER; note = 2'-deoxy-2'-fluorocytidine-3'-phosphate
  modified_base 9: mod_base = OTHER; note = 2'-O-methylcytidine-3'-phosphate
  modified_base 10: mod_base = OTHER; note = 2'-deoxy-2'-fluoroadenosine-3'-phosphate
  modified_base 11: mod_base = OTHER; note = 2'-O-methyluridine-3'-phosphate
  modified_base 12: mod_base = OTHER; note = 2'-O-methyladenosine-3'-phosphate
  modified_base 13: mod_base = OTHER; note = 2'-O-methyluridine-3'-phosphate
  modified_base 14: mod_base = OTHER; note = 2'-deoxy-2'-fluorouridine-3'-phosphate
  modified_base 15: mod_base = OTHER; note = 2'-O-methyluridine-3'-phosphate
  modified_base 16: mod_base = OTHER; note = 2'-deoxy-2'-fluoroguanosine-3'-phosphate
  modified_base 17: mod_base = OTHER; note = 2'-O-methyluridine-3'-phosphate
  modified_base 18: mod_base = OTHER; note = 2'-deoxy-2'-fluorocytidine-3'-phosphate
  modified_base 19: mod_base = OTHER; note = 2'-O-methyladenosine-3'-phosphate
  modified_base 20: mod_base = OTHER; note = 2'-deoxy-2'-fluorocytidine-3'-phosphate
  modified_base 21: mod_base = OTHER; note = 2'-O-methyladenosine-3'-phosphorothioate
  modified_base 22: mod_base = OTHER; note = 2'-O-methyladenosine-3'-phosphorothioate
  modified_base 23: mod_base = OTHER; note = 2'-O-methyladenosine
ttgatgcccatatttgtcacaaa

SEQ ID NO: 193 - RNA, 21 nt, synthetic construct
  source 1..21: mol_type = other RNA
  modified_base 1: mod_base = OTHER; note = 2'-O-methyluridine-3'-phosphorothioate
  modified_base 2: mod_base = OTHER; note = 2'-O-methylguanosine-3'-phosphorothioate
  modified_base 3: mod_base = OTHER; note = 2'-deoxy-2'-fluorouridine-3'-phosphate
  modified_base 4: mod_base = OTHER; note = 2'-O-methylguanosine-3'-phosphate
  modified_base 5: mod_base = OTHER; note = 2'-deoxy-2'-fluoroadenosine-3'-phosphate
  modified_base 6: mod_base = OTHER; note = 2'-O-methylcytidine-3'-phosphate
  modified_base 7: mod_base = OTHER; note = 2'-deoxy-2'-fluoroadenosine-3'-phosphate
  modified_base 8: mod_base = OTHER; note = 2'-O-methyladenosine-3'-phosphate
  modified_base 9: mod_base = OTHER; note = 2'-deoxy-2'-fluoroadenosine-3'-phosphate
  modified_base 10: mod_base = OTHER; note = 2'-deoxy-2'-fluorouridine-3'-phosphate
  modified_base 11: mod_base = OTHER; note = 2'-deoxy-2'-fluoroadenosine-3'-phosphate
  modified_base 12: mod_base = OTHER; note = 2'-O-methyluridine-3'-phosphate
  modified_base 13: mod_base = OTHER; note = 2'-deoxy-2'-fluoroguanosine-3'-phosphate
  modified_base 14: mod_base = OTHER; note = 2'-O-methylguanosine-3'-phosphate
  modified_base 15: mod_base = OTHER; note = 2'-deoxy-2'-fluoroguanosine-3'-phosphate
  modified_base 16: mod_base = OTHER; note = 2'-O-methylcytidine-3'-phosphate
  modified_base 17: mod_base = OTHER; note = 2'-deoxy-2'-fluoroadenosine-3'-phosphate
  modified_base 18: mod_base = OTHER; note = 2'-O-methyluridine-3'-phosphate
  modified_base 19: mod_base = OTHER; note = 2'-deoxy-2'-fluorocytidine-3'-phosphate
  modified_base 20: mod_base = OTHER; note = 2'-O-methyladenosine-3'-phosphate
  modified_base 21: mod_base = OTHER; note = 2'-deoxy-2'-fluoroadenosine-3'-phosphate ((2S,4R)-1-[29-[[2-(acetylamino)-2-deoxy-beta-D-galactopyra nosyl]oxy]-14,14-bis[[3-[[3-[[5-[[2-(acetylamino)-2-deoxy-b eta-D-galactopyranosyl]oxy]-1-oxopentyl]amino]propyl]amino] -3-oxopropoxy]methyl]-1,12,19,25-tetraoxo-16-oxa-13,20,24-t riazanonacos-1-yl]-4-hydroxy-2-pyrrolidinyl)methyl ester
tgtgacaaatatgggcatcaa

SEQ ID NO: 194 - RNA, 23 nt, synthetic construct
  source 1..23: mol_type = other RNA
  modified_base 1: mod_base = OTHER; note 5'-O-(N-morpholinyl)-2'-O-methyluridine-3'-phosphorothioate
  modified_base 2: mod_base = OTHER; note = 2'-deoxy-2'-fluorouridine-3'-phosphorothioate
  modified_base 3: mod_base = OTHER; note = 2'-O-methylguanosine-3'-phosphate
  modified_base 4: mod_base = OTHER; note = 2'-deoxy-2'-fluoroadenosine-3'-phosphate
  modified_base 5: mod_base = OTHER; note = 2'-O-methyluridine-3'-phosphate
  modified_base 6: mod_base = OTHER; note = 2'-deoxy-2'-fluoroguanosine-3'-phosphate
  modified_base 7: mod_base = OTHER; note = 2'-O-methylcytidine-3'-phosphate
  modified_base 8: mod_base = OTHER; note = 2'-deoxy-2'-fluorocytidine-3'-phosphate
  modified_base 9: mod_base = OTHER; note = 2'-O-methylcytidine-3'-phosphate
  modified_base 10: mod_base = OTHER; note = 2'-deoxy-2'-fluoroadenosine-3'-phosphate
  modified_base 11: mod_base = OTHER; note = 2'-O-methyluridine-3'-phosphate
  modified_base 12: mod_base = OTHER; note = 2'-O-methyladenosine-3'-phosphate
  modified_base 13: mod_base = OTHER; note = 2'-O-methyluridine-3'-phosphate
  modified_base 14: mod_base = OTHER; note = 2'-deoxy-2'-fluorouridine-3'-phosphate
  modified_base 15: mod_base = OTHER; note = 2'-O-methyluridine-3'-phosphate
  modified_base 16: mod_base = OTHER; note = 2'-deoxy-2'-fluoroguanosine-3'-phosphate
  modified_base 17: mod_base = OTHER; note = 2'-O-methyluridine-3'-phosphate
  modified_base 18: mod_base = OTHER; note = 2'-deoxy-2'-fluorocytidine-3'-phosphate
  modified_base 19: mod_base = OTHER; note = 2'-O-methyladenosine-3'-phosphate
  modified_base 20: mod_base = OTHER; note = 2'-deoxy-2'-fluorocytidine-3'-phosphate
  modified_base 21: mod_base = OTHER; note = 2'-O-methyladenosine-3'-phosphorothioate
  modified_base 22: mod_base = OTHER; note = 2'-O-methyladenosine-3'-phosphorothioate
  modified_base 23: mod_base = OTHER; note = 2'-O-methyladenosine
ttgatgcccatatttgtcacaaa

SEQ ID NO: 195 - RNA, 21 nt, synthetic construct
  source 1..21: mol_type = other RNA
  modified_base 1: mod_base = OTHER; note = 2'-O-methyluridine-3'-phosphorothioate
  modified_base 2: mod_base = OTHER; note = 2'-O-methylguanosine-3'-phosphorothioate
  modified_base 3: mod_base = OTHER; note = 2'-deoxy-2'-fluorouridine-3'-phosphate
  modified_base 4: mod_base = OTHER; note = 2'-O-methylguanosine-3'-phosphate
  modified_base 5: mod_base = OTHER; note = 2'-deoxy-2'-fluoroadenosine-3'-phosphate
  modified_base 6: mod_base = OTHER; note = 2'-O-methylcytidine-3'-phosphate
  modified_base 7: mod_base = OTHER; note = 2'-deoxy-2'-fluoroadenosine-3'-phosphate
  modified_base 8: mod_base = OTHER; note = 2'-O-methyladenosine-3'-phosphate
  modified_base 9: mod_base = OTHER; note = 2'-deoxy-2'-fluoroadenosine-3'-phosphate
  modified_base 10: mod_base = OTHER; note = 2'-deoxy-2'-fluorouridine-3'-phosphate
  modified_base 11: mod_base = OTHER; note = 2'-deoxy-2'-fluoroadenosine-3'-phosphate
  modified_base 12: mod_base = OTHER; note = 2'-O-methyluridine-3'-phosphate
  modified_base 13: mod_base = OTHER; note = 2'-deoxy-2'-fluoroguanosine-3'-phosphate
  modified_base 14: mod_base = OTHER; note = 2'-O-methylguanosine-3'-phosphate
  modified_base 15: mod_base = OTHER; note = 2'-deoxy-2'-fluoroguanosine-3'-phosphate
  modified_base 16: mod_base = OTHER; note = 2'-O-methylcytidine-3'-phosphate
  modified_base 17: mod_base = OTHER; note = 2'-deoxy-2'-fluoroadenosine-3'-phosphate
  modified_base 18: mod_base = OTHER; note = 2'-O-methyluridine-3'-phosphate
  modified_base 19: mod_base = OTHER; note = 2'-deoxy-2'-fluorocytidine-3'-phosphate
  modified_base 20: mod_base = OTHER; note = 2'-O-methyladenosine-3'-phosphate
  modified_base 21: mod_base = OTHER; note = 2'-deoxy-2'-fluoroadenosine-3'-phosphate ((2S,4R)-1-[29-[[2-(acetylamino)-2-deoxy-beta-D-galactopyra nosyl]oxy]-14,14-bis[[3-[[3-[[5-[[2-(acetylamino)-2-deoxy-b eta-D-galactopyranosyl]oxy]-1-oxopentyl]amino]propyl]amino] -3-oxopropoxy]methyl]-1,12,19,25-tetraoxo-16-oxa-13,20,24-t riazanonacos-1-yl]-4-hydroxy-2-pyrrolidinyl)methyl ester
tgtgacaaatatgggcatcaa

SEQ ID NO: 196 - RNA, 23 nt, synthetic construct
  source 1..23: mol_type = other RNA
  modified_base 1: mod_base = OTHER; note 5'-deoxy-5'-(N-morpholinylmethyl)-2'-O-methyluridine-3'-pho sphorothioate
  modified_base 2: mod_base = OTHER; note = 2'-O-methyluridine-3'-phosphorothioate
  modified_base 3: mod_base = OTHER; note = 2'-O-methylguanosine-3'-phosphate
  modified_base 4: mod_base = OTHER; note = 2'-deoxy-2'-fluoroadenosine-3'-phosphate
  modified_base 5: mod_base = OTHER; note = 2'-O-methyluridine-3'-phosphate
  modified_base 6: mod_base = OTHER; note = 2'-deoxy-2'-fluoroguanosine-3'-phosphate
  modified_base 7: mod_base = OTHER; note = 2'-O-methylcytidine-3'-phosphate
  modified_base 8: mod_base = OTHER; note = 2'-deoxy-2'-fluorocytidine-3'-phosphate
  modified_base 9: mod_base = OTHER; note = 2'-O-methylcytidine-3'-phosphate
  modified_base 10: mod_base = OTHER; note = 2'-deoxy-2'-fluoroadenosine-3'-phosphate
  modified_base 11: mod_base = OTHER; note = 2'-O-methyluridine-3'-phosphate
  modified_base 12: mod_base = OTHER; note = 2'-O-methyladenosine-3'-phosphate
  modified_base 13: mod_base = OTHER; note = 2'-O-methyluridine-3'-phosphate
  modified_base 14: mod_base = OTHER; note = 2'-deoxy-2'-fluorouridine-3'-phosphate
  modified_base 15: mod_base = OTHER; note = 2'-O-methyluridine-3'-phosphate
  modified_base 16: mod_base = OTHER; note = 2'-deoxy-2'-fluoroguanosine-3'-phosphate
  modified_base 17: mod_base = OTHER; note = 2'-O-methyluridine-3'-phosphate
  modified_base 18: mod_base = OTHER; note = 2'-deoxy-2'-fluorocytidine-3'-phosphate
  modified_base 19: mod_base = OTHER; note = 2'-O-methyladenosine-3'-phosphate
  modified_base 20: mod_base = OTHER; note = 2'-deoxy-2'-fluorocytidine-3'-phosphate
  modified_base 21: mod_base = OTHER; note = 2'-O-methyladenosine-3'-phosphorothioate
  modified_base 22: mod_base = OTHER; note = 2'-O-methyladenosine-3'-phosphorothioate
  modified_base 23: mod_base = OTHER; note = 2'-O-methyladenosine
ttgatgcccatatttgtcacaaa

SEQ ID NO: 197 - RNA, 21 nt, synthetic construct
  source 1..21: mol_type = other RNA
  modified_base 1: mod_base = OTHER; note = 2'-O-methyluridine-3'-phosphorothioate
  modified_base 2: mod_base = OTHER; note = 2'-O-methylguanosine-3'-phosphorothioate
  modified_base 3: mod_base = OTHER; note = 2'-deoxy-2'-fluorouridine-3'-phosphate
  modified_base 4: mod_base = OTHER; note = 2'-O-methylguanosine-3'-phosphate
  modified_base 5: mod_base = OTHER; note = 2'-deoxy-2'-fluoroadenosine-3'-phosphate
  modified_base 6: mod_base = OTHER; note = 2'-O-methylcytidine-3'-phosphate
  modified_base 7: mod_base = OTHER; note = 2'-deoxy-2'-fluoroadenosine-3'-phosphate
  modified_base 8: mod_base = OTHER; note = 2'-O-methyladenosine-3'-phosphate
  modified_base 9: mod_base = OTHER; note = 2'-deoxy-2'-fluoroadenosine-3'-phosphate
  modified_base 10: mod_base = OTHER; note = 2'-deoxy-2'-fluorouridine-3'-phosphate
  modified_base 11: mod_base = OTHER; note = 2'-deoxy-2'-fluoroadenosine-3'-phosphate
  modified_base 12: mod_base = OTHER; note = 2'-O-methyluridine-3'-phosphate
  modified_base 13: mod_base = OTHER; note = 2'-deoxy-2'-fluoroguanosine-3'-phosphate
  modified_base 14: mod_base = OTHER; note = 2'-O-methylguanosine-3'-phosphate
  modified_base 15: mod_base = OTHER; note = 2'-deoxy-2'-fluoroguanosine-3'-phosphate
  modified_base 16: mod_base = OTHER; note = 2'-O-methylcytidine-3'-phosphate
  modified_base 17: mod_base = OTHER; note = 2'-deoxy-2'-fluoroadenosine-3'-phosphate
  modified_base 18: mod_base = OTHER; note = 2'-O-methyluridine-3'-phosphate
  modified_base 19: mod_base = OTHER; note = 2'-deoxy-2'-fluorocytidine-3'-phosphate
  modified_base 20: mod_base = OTHER; note = 2'-O-methyladenosine-3'-phosphate
  modified_base 21: mod_base = OTHER; note = 2'-deoxy-2'-fluoroadenosine-3'-phosphate ((2S,4R)-1-[29-[[2-(acetylamino)-2-deoxy-beta-D-galactopyra nosyl]oxy]-14,14-bis[[3-[[3-[[5-[[2-(acetylamino)-2-deoxy-b eta-D-galactopyranosyl]oxy]-1-oxopentyl]amino]propyl]amino] -3-oxopropoxy]methyl]-1,12,19,25-tetraoxo-16-oxa-13,20,24-t riazanonacos-1-yl]-4-hydroxy-2-pyrrolidinyl)methyl ester
tgtgacaaatatgggcatcaa

SEQ ID NO: 198 - RNA, 23 nt, synthetic construct
  source 1..23: mol_type = other RNA
  modified_base 1: mod_base = OTHER; note = 2'-O-methyluridine-3'-phosphorothioate
  modified_base 2: mod_base = OTHER; note = 2'-O-methyluridine-3'-phosphorothioate
  modified_base 3: mod_base = OTHER; note = 2'-O-methylguanosine-3'-phosphate
  modified_base 4: mod_base = OTHER; note = 2'-deoxy-2'-fluoroadenosine-3'-phosphate
  modified_base 5: mod_base = OTHER; note = 2'-O-methyluridine-3'-phosphate
  modified_base 6: mod_base = OTHER; note = 2'-deoxy-2'-fluoroguanosine-3'-phosphate
  modified_base 7: mod_base = OTHER; note = 2'-O-methylcytidine-3'-phosphate
  modified_base 8: mod_base = OTHER; note = 2'-deoxy-2'-fluorocytidine-3'-phosphate
  modified_base 9: mod_base = OTHER; note = 2'-O-methylcytidine-3'-phosphate
  modified_base 10: mod_base = OTHER; note = 2'-deoxy-2'-fluoroadenosine-3'-phosphate
  modified_base 11: mod_base = OTHER; note = 2'-O-methyluridine-3'-phosphate
  modified_base 12: mod_base = OTHER; note = 2'-O-methyladenosine-3'-phosphate
  modified_base 13: mod_base = OTHER; note = 2'-O-methyluridine-3'-phosphate
  modified_base 14: mod_base = OTHER; note = 2'-deoxy-2'-fluorouridine-3'-phosphate
  modified_base 15: mod_base = OTHER; note = 2'-O-methyluridine-3'-phosphate
  modified_base 16: mod_base = OTHER; note = 2'-deoxy-2'-fluoroguanosine-3'-phosphate
  modified_base 17: mod_base = OTHER; note = 2'-O-methyluridine-3'-phosphate
  modified_base 18: mod_base = OTHER; note = 2'-deoxy-2'-fluorocytidine-3'-phosphate
  modified_base 19: mod_base = OTHER; note = 2'-O-methyladenosine-3'-phosphate
  modified_base 20: mod_base = OTHER; note = 2'-deoxy-2'-fluorocytidine-3'-phosphate
  modified_base 21: mod_base = OTHER; note = 2'-O-methyladenosine-3'-phosphorothioate
  modified_base 22: mod_base = OTHER; note = 2'-O-methyladenosine-3'-phosphorothioate
  modified_base 23: mod_base = OTHER; note = 2'-O-methyladenosine
ttgatgcccatatttgtcacaaa

SEQ ID NO: 199 - RNA, 21 nt, synthetic construct
  source 1..21: mol_type = other RNA
  modified_base 1: mod_base = OTHER; note = 2'-O-methyluridine-3'-phosphorothioate
  modified_base 2: mod_base = OTHER; note = 2'-O-methylguanosine-3'-phosphorothioate
  modified_base 3: mod_base = OTHER; note = 2'-deoxy-2'-fluorouridine-3'-phosphate
  modified_base 4: mod_base = OTHER; note = 2'-O-methylguanosine-3'-phosphate
  modified_base 5: mod_base = OTHER; note = 2'-deoxy-2'-fluoroadenosine-3'-phosphate
  modified_base 6: mod_base = OTHER; note = 2'-O-methylcytidine-3'-phosphate
  modified_base 7: mod_base = OTHER; note = 2'-deoxy-2'-fluoroadenosine-3'-phosphate
  modified_base 8: mod_base = OTHER; note = 2'-O-methyladenosine-3'-phosphate
  modified_base 9: mod_base = OTHER; note = 2'-deoxy-2'-fluoroadenosine-3'-phosphate
  modified_base 10: mod_base = OTHER; note = 2'-deoxy-2'-fluorouridine-3'-phosphate
  modified_base 11: mod_base = OTHER; note = 2'-deoxy-2'-fluoroadenosine-3'-phosphate
  modified_base 12: mod_base = OTHER; note = 2'-O-methyluridine-3'-phosphate
  modified_base 13: mod_base = OTHER; note = 2'-deoxy-2'-fluoroguanosine-3'-phosphate
  modified_base 14: mod_base = OTHER; note = 2'-O-methylguanosine-3'-phosphate
  modified_base 15: mod_base = OTHER; note = 2'-deoxy-2'-fluoroguanosine-3'-phosphate
  modified_base 16: mod_base = OTHER; note = 2'-O-methylcytidine-3'-phosphate
  modified_base 17: mod_base = OTHER; note = 2'-deoxy-2'-fluoroadenosine-3'-phosphate
  modified_base 18: mod_base = OTHER; note = 2'-O-methyluridine-3'-phosphate
  modified_base 19: mod_base = OTHER; note = 2'-deoxy-2'-fluorocytidine-3'-phosphate
  modified_base 20: mod_base = OTHER; note = 2'-O-methyladenosine-3'-phosphate
  modified_base 21: mod_base = OTHER; note = 2'-deoxy-2'-fluoroadenosine-3'-phosphate ((2S,4R)-1-[29-[[2-(acetylamino)-2-deoxy-beta-D-galactopyra nosyl]oxy]-14,14-bis[[3-[[3-[[5-[[2-(acetylamino)-2-deoxy-b eta-D-galactopyranosyl]oxy]-1-oxopentyl]amino]propyl]amino] -3-oxopropoxy]methyl]-1,12,19,25-tetraoxo-16-oxa-13,20,24-t riazanonacos-1-yl]-4-hydroxy-2-pyrrolidinyl)methyl ester
tgtgacaaatatgggcatcaa

SEQ ID NO: 200 - RNA, 23 nt, synthetic construct
  source 1..23: mol_type = other RNA
  modified_base 1: mod_base = OTHER; note 5'-deoxy-5'-(N-morpholinylmethyl)-2'-O-methyluridine-3'-pho sphorothioate
  modified_base 2: mod_base = OTHER; note = 2'-deoxy-2'-fluorouridine-3'-phosphorothioate
  modified_base 3: mod_base = OTHER; note = 2'-O-methylguanosine-3'-phosphate
  modified_base 4: mod_base = OTHER; note = 2'-deoxy-2'-fluoroadenosine-3'-phosphate
  modified_base 5: mod_base = OTHER; note = 2'-O-methyluridine-3'-phosphate
  modified_base 6: mod_base = OTHER; note = 2'-deoxy-2'-fluoroguanosine-3'-phosphate
  modified_base 7: mod_base = OTHER; note = 2'-O-methylcytidine-3'-phosphate
  modified_base 8: mod_base = OTHER; note = 2'-deoxy-2'-fluorocytidine-3'-phosphate
  modified_base 9: mod_base = OTHER; note = 2'-O-methylcytidine-3'-phosphate
  modified_base 10: mod_base = OTHER; note = 2'-deoxy-2'-fluoroadenosine-3'-phosphate
  modified_base 11: mod_base = OTHER; note = 2'-O-methyluridine-3'-phosphate
  modified_base 12: mod_base = OTHER; note = 2'-O-methyladenosine-3'-phosphate
  modified_base 13: mod_base = OTHER; note = 2'-O-methyluridine-3'-phosphate
  modified_base 14: mod_base = OTHER; note = 2'-deoxy-2'-fluorouridine-3'-phosphate
  modified_base 15: mod_base = OTHER; note = 2'-O-methyluridine-3'-phosphate
  modified_base 16: mod_base = OTHER; note = 2'-deoxy-2'-fluoroguanosine-3'-phosphate
  modified_base 17: mod_base = OTHER; note = 2'-O-methyluridine-3'-phosphate
  modified_base 18: mod_base = OTHER; note = 2'-deoxy-2'-fluorocytidine-3'-phosphate
  modified_base 19: mod_base = OTHER; note = 2'-O-methyladenosine-3'-phosphate
  modified_base 20: mod_base = OTHER; note = 2'-deoxy-2'-fluorocytidine-3'-phosphate
  modified_base 21: mod_base = OTHER; note = 2'-O-methyladenosine-3'-phosphorothioate
  modified_base 22: mod_base = OTHER; note = 2'-O-methyladenosine-3'-phosphorothioate
  modified_base 23: mod_base = OTHER; note = 2'-O-methyladenosine
ttgatgcccatatttgtcacaaa

SEQ ID NO: 201 - RNA, 21 nt, synthetic construct
  source 1..21: mol_type = other RNA
  modified_base 1: mod_base = OTHER; note 5'-deoxy-5'-(N-morpholinylmethyl)-2'-O-methyluridine-3'-pho sphorothioate
  modified_base 2: mod_base = OTHER; note = 2'-deoxy-2'-fluoroguanosine-3'-phosphorothioate
  modified_base 3: mod_base = OTHER; note = 2'-deoxy-2'-fluorouridine-3'-phosphate
  modified_base 4: mod_base = OTHER; note = 2'-O-methylguanosine-3'-phosphate
  modified_base 5: mod_base = OTHER; note = 2'-deoxy-2'-fluoroadenosine-3'-phosphate
  modified_base 6: mod_base = OTHER; note = 2'-O-methylcytidine-3'-phosphate
  modified_base 7: mod_base = OTHER; note = 2'-deoxy-2'-fluoroadenosine-3'-phosphate
  modified_base 8: mod_base = OTHER; note = 2'-O-methyladenosine-3'-phosphate
  modified_base 9: mod_base = OTHER; note = 2'-deoxy-2'-fluoroadenosine-3'-phosphate
  modified_base 10: mod_base = OTHER; note = 2'-deoxy-2'-fluorouridine-3'-phosphate
  modified_base 11: mod_base = OTHER; note = 2'-deoxy-2'-fluoroadenosine-3'-phosphate
  modified_base 12: mod_base = OTHER; note = 2'-O-methyluridine-3'-phosphate
  modified_base 13: mod_base = OTHER; note = 2'-deoxy-2'-fluoroguanosine-3'-phosphate
  modified_base 14: mod_base = OTHER; note = 2'-O-methylguanosine-3'-phosphate
  modified_base 15: mod_base = OTHER; note = 2'-deoxy-2'-fluoroguanosine-3'-phosphate
  modified_base 16: mod_base = OTHER; note = 2'-O-methylcytidine-3'-phosphate
  modified_base 17: mod_base = OTHER; note = 2'-deoxy-2'-fluoroadenosine-3'-phosphate
  modified_base 18: mod_base = OTHER; note = 2'-O-methyluridine-3'-phosphate
  modified_base 19: mod_base = OTHER; note = 2'-deoxy-2'-fluorocytidine-3'-phosphate
  modified_base 20: mod_base = OTHER; note = 2'-O-methyladenosine-3'-phosphate
  modified_base 21: mod_base = OTHER; note = 2'-deoxy-2'-fluoroadenosine-3'-phosphate ((2S,4R)-1-[29-[[2-(acetylamino)-2-deoxy-beta-D-galactopyra nosyl]oxy]-14,14-bis[[3-[[3-[[5-[[2-(acetylamino)-2-deoxy-b eta-D-galactopyranosyl]oxy]-1-oxopentyl]amino]propyl]amino] -3-oxopropoxy]methyl]-1,12,19,25-tetraoxo-16-oxa-13,20,24-t riazanonacos-1-yl]-4-hydroxy-2-pyrrolidinyl)methyl ester
tgtgacaaatatgggcatcaa

SEQ ID NO: 202 - RNA, 23 nt, synthetic construct
  source 1..23: mol_type = other RNA
  modified_base 1: mod_base = OTHER; note = 2'-O-methyluridine-3'-phosphorothioate
  modified_base 2: mod_base = OTHER; note = 2'-deoxy-2'-fluorouridine-3'-phosphorothioate
  modified_base 3: mod_base = OTHER; note = 2'-O-methylguanosine-3'-phosphate
  modified_base 4: mod_base = OTHER; note = 2'-deoxy-2'-fluoroadenosine-3'-phosphate
  modified_base 5: mod_base = OTHER; note = 2'-O-methyluridine-3'-phosphate
  modified_base 6: mod_base = OTHER; note = 2'-deoxy-2'-fluoroguanosine-3'-phosphate
  modified_base 7: mod_base = OTHER; note = 2'-O-methylcytidine-3'-phosphate
  modified_base 8: mod_base = OTHER; note = 2'-deoxy-2'-fluorocytidine-3'-phosphate
  modified_base 9: mod_base = OTHER; note = 2'-O-methylcytidine-3'-phosphate
  modified_base 10: mod_base = OTHER; note = 2'-deoxy-2'-fluoroadenosine-3'-phosphate
  modified_base 11: mod_base = OTHER; note = 2'-O-methyluridine-3'-phosphate
  modified_base 12: mod_base = OTHER; note = 2'-O-methyladenosine-3'-phosphate
  modified_base 13: mod_base = OTHER; note = 2'-O-methyluridine-3'-phosphate
  modified_base 14: mod_base = OTHER; note = 2'-deoxy-2'-fluorouridine-3'-phosphate
  modified_base 15: mod_base = OTHER; note = 2'-O-methyluridine-3'-phosphate
  modified_base 16: mod_base = OTHER; note = 2'-deoxy-2'-fluoroguanosine-3'-phosphate
  modified_base 17: mod_base = OTHER; note = 2'-O-methyluridine-3'-phosphate
  modified_base 18: mod_base = OTHER; note = 2'-deoxy-2'-fluorocytidine-3'-phosphate
  modified_base 19: mod_base = OTHER; note = 2'-O-methyladenosine-3'-phosphate
  modified_base 20: mod_base = OTHER; note = 2'-deoxy-2'-fluorocytidine-3'-phosphate
  modified_base 21: mod_base = OTHER; note = 2'-O-methyladenosine-3'-phosphorothioate
  modified_base 22: mod_base = OTHER; note = 2'-O-methyladenosine-3'-phosphorothioate
  modified_base 23: mod_base = OTHER; note = 2'-O-methyladenosine
ttgatgcccatatttgtcacaaa

SEQ ID NO: 203 - RNA, 21 nt, synthetic construct
  source 1..21: mol_type = other RNA
  modified_base 1: mod_base = OTHER; note 5'-deoxy-5'-(N-morpholinylmethyl)-2'-O-methyluridine-3'-pho sphorothioate
  modified_base 2: mod_base = OTHER; note = 2'-O-methylguanosine-3'-phosphorothioate
  modified_base 3: mod_base = OTHER; note = 2'-deoxy-2'-fluorouridine-3'-phosphate
  modified_base 4: mod_base = OTHER; note = 2'-O-methylguanosine-3'-phosphate
  modified_base 5: mod_base = OTHER; note = 2'-deoxy-2'-fluoroadenosine-3'-phosphate
  modified_base 6: mod_base = OTHER; note = 2'-O-methylcytidine-3'-phosphate
  modified_base 7: mod_base = OTHER; note = 2'-deoxy-2'-fluoroadenosine-3'-phosphate
  modified_base 8: mod_base = OTHER; note = 2'-O-methyladenosine-3'-phosphate
  modified_base 9: mod_base = OTHER; note = 2'-deoxy-2'-fluoroadenosine-3'-phosphate
  modified_base 10: mod_base = OTHER; note = 2'-deoxy-2'-fluorouridine-3'-phosphate
  modified_base 11: mod_base = OTHER; note = 2'-deoxy-2'-fluoroadenosine-3'-phosphate
  modified_base 12: mod_base = OTHER; note = 2'-O-methyluridine-3'-phosphate
  modified_base 13: mod_base = OTHER; note = 2'-deoxy-2'-fluoroguanosine-3'-phosphate
  modified_base 14: mod_base = OTHER; note = 2'-O-methylguanosine-3'-phosphate
  modified_base 15: mod_base = OTHER; note = 2'-deoxy-2'-fluoroguanosine-3'-phosphate
  modified_base 16: mod_base = OTHER; note = 2'-O-methylcytidine-3'-phosphate
  modified_base 17: mod_base = OTHER; note = 2'-deoxy-2'-fluoroadenosine-3'-phosphate
  modified_base 18: mod_base = OTHER; note = 2'-O-methyluridine-3'-phosphate
  modified_base 19: mod_base = OTHER; note = 2'-deoxy-2'-fluorocytidine-3'-phosphate
  modified_base 20: mod_base = OTHER; note = 2'-O-methyladenosine-3'-phosphate
  modified_base 21: mod_base = OTHER; note = 2'-deoxy-2'-fluoroadenosine-3'-phosphate ((2S,4R)-1-[29-[[2-(acetylamino)-2-deoxy-beta-D-galactopyra nosyl]oxy]-14,14-bis[[3-[[3-[[5-[[2-(acetylamino)-2-deoxy-b eta-D-galactopyranosyl]oxy]-1-oxopentyl]amino]propyl]amino] -3-oxopropoxy]methyl]-1,12,19,25-tetraoxo-16-oxa-13,20,24-t riazanonacos-1-yl]-4-hydroxy-2-pyrrolidinyl)methyl ester
tgtgacaaatatgggcatcaa

SEQ ID NO: 204 - RNA, 23 nt, synthetic construct
  source 1..23: mol_type = other RNA
  modified_base 1: mod_base = OTHER; note = 2'-O-methyluridine-3'-phosphorothioate
  modified_base 2: mod_base = OTHER; note = 2'-deoxy-2'-fluorouridine-3'-phosphorothioate
  modified_base 3: mod_base = OTHER; note = 2'-O-methylguanosine-3'-phosphate
  modified_base 4: mod_base = OTHER; note = 2'-deoxy-2'-fluoroadenosine-3'-phosphate
  modified_base 5: mod_base = OTHER; note = 2'-O-methyluridine-3'-phosphate
  modified_base 6: mod_base = OTHER; note = 2'-deoxy-2'-fluoroguanosine-3'-phosphate
  modified_base 7: mod_base = OTHER; note = 2'-O-methylcytidine-3'-phosphate
  modified_base 8: mod_base = OTHER; note = 2'-deoxy-2'-fluorocytidine-3'-phosphate
  modified_base 9: mod_base = OTHER; note = 2'-O-methylcytidine-3'-phosphate
  modified_base 10: mod_base = OTHER; note = 2'-deoxy-2'-fluoroadenosine-3'-phosphate
  modified_base 11: mod_base = OTHER; note = 2'-O-methyluridine-3'-phosphate
  modified_base 12: mod_base = OTHER; note = 2'-O-methyladenosine-3'-phosphate
  modified_base 13: mod_base = OTHER; note = 2'-O-methyluridine-3'-phosphate
  modified_base 14: mod_base = OTHER; note = 2'-deoxy-2'-fluorouridine-3'-phosphate
  modified_base 15: mod_base = OTHER; note = 2'-O-methyluridine-3'-phosphate
  modified_base 16: mod_base = OTHER; note = 2'-deoxy-2'-fluoroguanosine-3'-phosphate
  modified_base 17: mod_base = OTHER; note = 2'-O-methyluridine-3'-phosphate
  modified_base 18: mod_base = OTHER; note = 2'-deoxy-2'-fluorocytidine-3'-phosphate
  modified_base 19: mod_base = OTHER; note = 2'-O-methyladenosine-3'-phosphate
  modified_base 20: mod_base = OTHER; note = 2'-deoxy-2'-fluorocytidine-3'-phosphate
  modified_base 21: mod_base = OTHER; note = 2'-O-methyladenosine-3'-phosphorothioate
  modified_base 22: mod_base = OTHER; note = 2'-O-methyladenosine-3'-phosphorothioate
  modified_base 23: mod_base = OTHER; note = 2'-O-methyladenosine
ttgatgcccatatttgtcacaaa

SEQ ID NO: 205 - RNA, 21 nt, synthetic construct
  source 1..21: mol_type = other RNA
  modified_base 1: mod_base = OTHER; note = 2'-O-methyluridine-3'-phosphorothioate
  modified_base 2: mod_base = OTHER; note = 2'-O-methylguanosine-3'-phosphorothioate
  modified_base 3: mod_base = OTHER; note = 2'-deoxy-2'-fluorouridine-3'-phosphate
  modified_base 4: mod_base = OTHER; note = 2'-O-methylguanosine-3'-phosphate
  modified_base 5: mod_base = OTHER; note = 2'-deoxy-2'-fluoroadenosine-3'-phosphate
  modified_base 6: mod_base = OTHER; note = 2'-O-methylcytidine-3'-phosphate
  modified_base 7: mod_base = OTHER; note = 2'-deoxy-2'-fluoroadenosine-3'-phosphate
  modified_base 8: mod_base = OTHER; note = 2'-O-methyladenosine-3'-phosphate
  modified_base 9: mod_base = OTHER; note = 2'-deoxy-2'-fluoroadenosine-3'-phosphate
  modified_base 10: mod_base = OTHER; note = 2'-deoxy-2'-fluorouridine-3'-phosphate
  modified_base 11: mod_base = OTHER; note = 2'-deoxy-2'-fluoroadenosine-3'-phosphate
  modified_base 12: mod_base = OTHER; note = 2'-O-methyluridine-3'-phosphate
  modified_base 13: mod_base = OTHER; note = 2'-deoxy-2'-fluoroguanosine-3'-phosphate
  modified_base 14: mod_base = OTHER; note = 2'-O-methylguanosine-3'-phosphate
  modified_base 15: mod_base = OTHER; note = 2'-deoxy-2'-fluoroguanosine-3'-phosphate
  modified_base 16: mod_base = OTHER; note = 2'-O-methylcytidine-3'-phosphate
  modified_base 17: mod_base = OTHER; note = 2'-deoxy-2'-fluoroadenosine-3'-phosphate
  modified_base 18: mod_base = OTHER; note = 2'-O-methyluridine-3'-phosphate
  modified_base 19: mod_base = OTHER; note = 2'-deoxy-2'-fluorocytidine-3'-phosphate
  modified_base 20: mod_base = OTHER; note = 2'-O-methyladenosine-3'-phosphate
  modified_base 21: mod_base = OTHER; note = 2'-deoxy-2'-fluoroadenosine-3'-phosphate ((2S,4R)-1-[29-[[2-(acetylamino)-2-deoxy-beta-D-galactopyra nosyl]oxy]-14,14-bis[[3-[[3-[[5-[[2-(acetylamino)-2-deoxy-b eta-D-galactopyranosyl]oxy]-1-oxopentyl]amino]propyl]amino] -3-oxopropoxy]methyl]-1,12,19,25-tetraoxo-16-oxa-13,20,24-t riazanonacos-1-yl]-4-hydroxy-2-pyrrolidinyl)methyl ester
tgtgacaaatatgggcatcaa

SEQ ID NO: 206 - RNA, 23 nt, synthetic construct
  source 1..23: mol_type = other RNA
  modified_base 1: mod_base = OTHER; note = 2'-O-methyluridine-3'-phosphorothioate
  modified_base 2: mod_base = OTHER; note = 2'-deoxy-2'-fluorouridine-3'-phosphorothioate
  modified_base 3: mod_base = OTHER; note = 2'-O-methylguanosine-3'-phosphate
  modified_base 4: mod_base = OTHER; note = 2'-deoxy-2'-fluoroadenosine-3'-phosphate
  modified_base 5: mod_base = OTHER; note = 2'-O-methyluridine-3'-phosphate
  modified_base 6: mod_base = OTHER; note = 2'-deoxy-2'-fluoroguanosine-3'-phosphate
  modified_base 7: mod_base = OTHER; note = 2'-O-methylcytidine-3'-phosphate
  modified_base 8: mod_base = OTHER; note = 2'-deoxy-2'-fluorocytidine-3'-phosphate
  modified_base 9: mod_base = OTHER; note = 2'-O-methylcytidine-3'-phosphate
  modified_base 10: mod_base = OTHER; note = 2'-deoxy-2'-fluoroadenosine-3'-phosphate
  modified_base 11: mod_base = OTHER; note = 2'-O-methyluridine-3'-phosphate
  modified_base 12: mod_base = OTHER; note = 2'-O-methyladenosine-3'-phosphate
  modified_base 13: mod_base = OTHER; note = 2'-O-methyluridine-3'-phosphate
  modified_base 14: mod_base = OTHER; note = 2'-deoxy-2'-fluorouridine-3'-phosphate
  modified_base 15: mod_base = OTHER; note = 2'-O-methyluridine-3'-phosphate
  modified_base 16: mod_base = OTHER; note = 2'-deoxy-2'-fluoroguanosine-3'-phosphate
  modified_base 17: mod_base = OTHER; note = 2'-O-methyluridine-3'-phosphate
  modified_base 18: mod_base = OTHER; note = 2'-deoxy-2'-fluorocytidine-3'-phosphate
  modified_base 19: mod_base = OTHER; note = 2'-O-methyladenosine-3'-phosphate
  modified_base 20: mod_base = OTHER; note = 2'-deoxy-2'-fluorocytidine-3'-phosphate
  modified_base 21: mod_base = OTHER; note = 2'-O-methyladenosine-3'-phosphorothioate
  modified_base 22: mod_base = OTHER; note = 2'-O-methyladenosine-3'-phosphorothioate
  modified_base 23: mod_base = OTHER; note = 2'-O-methyladenosine
ttgatgcccatatttgtcacaaa

SEQ ID NO: 207 - RNA, 21 nt, synthetic construct
  source 1..21: mol_type = other RNA
  modified_base 1: mod_base = OTHER; note = 5'-deoxy-5'-(N-morpholinyl)-2'-O,4'-C-methylene adenosine-3'-phosphorothioate
  modified_base 2: mod_base = OTHER; note = 2'-O-methyladenosine-3'-phosphorothioate
  modified_base 3: mod_base = OTHER; note = 2'-deoxy-2'-fluorocytidine-3'-phosphate
  modified_base 4: mod_base = OTHER; note = 2'-O-methyladenosine-3'-phosphate
  modified_base 5: mod_base = OTHER; note = 2'-deoxy-2'-fluoroguanosine-3'-phosphate
  modified_base 6: mod_base = OTHER; note = 2'-O-methyluridine-3'-phosphate
  modified_base 7: mod_base = OTHER; note = 2'-deoxy-2'-fluoroguanosine-3'-phosphate
  modified_base 8: mod_base = OTHER; note = 2'-O-methyluridine-3'-phosphate
  modified_base 9: mod_base = OTHER; note = 2'-deoxy-2'-fluorouridine-3'-phosphate
  modified_base 10: mod_base = OTHER; note = 2'-deoxy-2'-fluorocytidine-3'-phosphate
  modified_base 11: mod_base = OTHER; note = 2'-deoxy-2'-fluorouridine-3'-phosphate
  modified_base 12: mod_base = OTHER; note = 2'-O-methyluridine-3'-phosphate
  modified_base 13: mod_base = OTHER; note = 2'-deoxy-2'-fluoroguanosine-3'-phosphate
  modified_base 14: mod_base = OTHER; note = 2'-O-methylcytidine-3'-phosphate
  modified_base 15: mod_base = OTHER; note = 2'-deoxy-2'-fluorouridine-3'-phosphate
  modified_base 16: mod_base = OTHER; note = 2'-O-methylcytidine-3'-phosphate
  modified_base 17: mod_base = OTHER; note = 2'-deoxy-2'-fluorouridine-3'-phosphate
  modified_base 18: mod_base = OTHER; note = 2'-O-methyladenosine-3'-phosphate
  modified_base 19: mod_base = OTHER; note = 2'-deoxy-2'-fluorouridine-3'-phosphate
  modified_base 20: mod_base = OTHER; note = 2'-O-methyladenosine-3'-phosphate
  modified_base 21: mod_base = OTHER; note = 2'-deoxy-2'-fluoroadenosine-3'-phosphate ((2S,4R)-1-[29-[[2-(acetylamino)-2-deoxy-beta-D-galactopyra nosyl]oxy]-14,14-bis[[3-[[3-[[5-[[2-(acetylamino)-2-deoxy-b eta-D-galactopyranosyl]oxy]-1-oxopentyl]amino]propyl]amino] -3-oxopropoxy]methyl]-1,12,19,25-tetraoxo-16-oxa-13,20,24-t riazanonacos-1-yl]-4-hydroxy-2-pyrrolidinyl)methyl ester
aacagtgttcttgctctataa

SEQ ID NO: 208 - RNA, 21 nt, synthetic construct
  source 1..21: mol_type = other RNA
  modified_base 1: mod_base = OTHER; note = 5'-deoxy-5'-(N-morpholinyl)-2'-O,4'-C-methylene adenosine-3'-phosphate
  modified_base 2: mod_base = OTHER; note = 2'-O-methyladenosine-3'-phosphorothioate
  modified_base 3: mod_base = OTHER; note = 2'-deoxy-2'-fluorocytidine-3'-phosphate
  modified_base 4: mod_base = OTHER; note = 2'-O-methyladenosine-3'-phosphate
  modified_base 5: mod_base = OTHER; note = 2'-deoxy-2'-fluoroguanosine-3'-phosphate
  modified_base 6: mod_base = OTHER; note = 2'-O-methyluridine-3'-phosphate
  modified_base 7: mod_base = OTHER; note = 2'-deoxy-2'-fluoroguanosine-3'-phosphate
  modified_base 8: mod_base = OTHER; note = 2'-O-methyluridine-3'-phosphate
  modified_base 9: mod_base = OTHER; note = 2'-deoxy-2'-fluorouridine-3'-phosphate
  modified_base 10: mod_base = OTHER; note = 2'-deoxy-2'-fluorocytidine-3'-phosphate
  modified_base 11: mod_base = OTHER; note = 2'-deoxy-2'-fluorouridine-3'-phosphate
  modified_base 12: mod_base = OTHER; note = 2'-O-methyluridine-3'-phosphate
  modified_base 13: mod_base = OTHER; note = 2'-deoxy-2'-fluoroguanosine-3'-phosphate
  modified_base 14: mod_base = OTHER; note = 2'-O-methylcytidine-3'-phosphate
  modified_base 15: mod_base = OTHER; note = 2'-deoxy-2'-fluorouridine-3'-phosphate
  modified_base 16: mod_base = OTHER; note = 2'-O-methylcytidine-3'-phosphate
  modified_base 17: mod_base = OTHER; note = 2'-deoxy-2'-fluorouridine-3'-phosphate
  modified_base 18: mod_base = OTHER; note = 2'-O-methyladenosine-3'-phosphate
  modified_base 19: mod_base = OTHER; note = 2'-deoxy-2'-fluorouridine-3'-phosphate
  modified_base 20: mod_base = OTHER; note = 2'-O-methyladenosine-3'-phosphate
  modified_base 21: mod_base = OTHER; note = 2'-deoxy-2'-fluoroadenosine-3'-phosphate ((2S,4R)-1-[29-[[2-(acetylamino)-2-deoxy-beta-D-galactopyra nosyl]oxy]-14,14-bis[[3-[[3-[[5-[[2-(acetylamino)-2-deoxy-b eta-D-galactopyranosyl]oxy]-1-oxopentyl]amino]propyl]amino] -3-oxopropoxy]methyl]-1,12,19,25-tetraoxo-16-oxa-13,20,24-t riazanonacos-1-yl]-4-hydroxy-2-pyrrolidinyl)methyl ester
aacagtgttcttgctctataa

SEQ ID NO: 209 - RNA, 21 nt, synthetic construct
  source 1..21: mol_type = other RNA
  modified_base 1: mod_base = OTHER; note = 5'-deoxy-5'-(N-morpholinyl)-2'-O,4'-C-methylene adenosine-3'-phosphate
  modified_base 2: mod_base = OTHER; note = 2'-O-methyladenosine-3'-phosphate
  modified_base 3: mod_base = OTHER; note = 2'-deoxy-2'-fluorocytidine-3'-phosphate
  modified_base 4: mod_base = OTHER; note = 2'-O-methyladenosine-3'-phosphate
  modified_base 5: mod_base = OTHER; note = 2'-deoxy-2'-fluoroguanosine-3'-phosphate
  modified_base 6: mod_base = OTHER; note = 2'-O-methyluridine-3'-phosphate
  modified_base 7: mod_base = OTHER; note = 2'-deoxy-2'-fluoroguanosine-3'-phosphate
  modified_base 8: mod_base = OTHER; note = 2'-O-methyluridine-3'-phosphate
  modified_base 9: mod_base = OTHER; note = 2'-deoxy-2'-fluorouridine-3'-phosphate
  modified_base 10: mod_base = OTHER; note = 2'-deoxy-2'-fluorocytidine-3'-phosphate
  modified_base 11: mod_base = OTHER; note = 2'-deoxy-2'-fluorouridine-3'-phosphate
  modified_base 12: mod_base = OTHER; note = 2'-O-methyluridine-3'-phosphate
  modified_base 13: mod_base = OTHER; note = 2'-deoxy-2'-fluoroguanosine-3'-phosphate
  modified_base 14: mod_base = OTHER; note = 2'-O-methylcytidine-3'-phosphate
  modified_base 15: mod_base = OTHER; note = 2'-deoxy-2'-fluorouridine-3'-phosphate
  modified_base 16: mod_base = OTHER; note = 2'-O-methylcytidine-3'-phosphate
  modified_base 17: mod_base = OTHER; note = 2'-deoxy-2'-fluorouridine-3'-phosphate
  modified_base 18: mod_base = OTHER; note = 2'-O-methyladenosine-3'-phosphate
  modified_base 19: mod_base = OTHER; note = 2'-deoxy-2'-fluorouridine-3'-phosphate
  modified_base 20: mod_base = OTHER; note = 2'-O-methyladenosine-3'-phosphate
  modified_base 21: mod_base = OTHER; note = 2'-deoxy-2'-fluoroadenosine-3'-phosphate ((2S,4R)-1-[29-[[2-(acetylamino)-2-deoxy-beta-D-galactopyra nosyl]oxy]-14,14-bis[[3-[[3-[[5-[[2-(acetylamino)-2-deoxy-b eta-D-galactopyranosyl]oxy]-1-oxopentyl]amino]propyl]amino] -3-oxopropoxy]methyl]-1,12,19,25-tetraoxo-16-oxa-13,20,24-t riazanonacos-1-yl]-4-hydroxy-2-pyrrolidinyl)methyl ester
aacagtgttcttgctctataa

SEQ ID NO: 210 - RNA, 21 nt, synthetic construct
  source 1..21: mol_type = other RNA
  modified_base 1: mod_base = OTHER; note = 5'-deoxy-5'-(N-morpholinyl)-2'-O,4'-C-methylene adenosine-3'-phosphorothioate
  modified_base 2: mod_base = OTHER; note = 2'-O-methyladenosine-3'-phosphate
  modified_base 3: mod_base = OTHER; note = 2'-deoxy-2'-fluorocytidine-3'-phosphate
  modified_base 4: mod_base = OTHER; note = 2'-O-methyladenosine-3'-phosphate
  modified_base 5: mod_base = OTHER; note = 2'-deoxy-2'-fluoroguanosine-3'-phosphate
  modified_base 6: mod_base = OTHER; note = 2'-O-methyluridine-3'-phosphate
  modified_base 7: mod_base = OTHER; note = 2'-deoxy-2'-fluoroguanosine-3'-phosphate
  modified_base 8: mod_base = OTHER; note = 2'-O-methyluridine-3'-phosphate
  modified_base 9: mod_base = OTHER; note = 2'-deoxy-2'-fluorouridine-3'-phosphate
  modified_base 10: mod_base = OTHER; note = 2'-deoxy-2'-fluorocytidine-3'-phosphate
  modified_base 11: mod_base = OTHER; note = 2'-deoxy-2'-fluorouridine-3'-phosphate
  modified_base 12: mod_base = OTHER; note = 2'-O-methyluridine-3'-phosphate
  modified_base 13: mod_base = OTHER; note = 2'-deoxy-2'-fluoroguanosine-3'-phosphate
  modified_base 14: mod_base = OTHER; note = 2'-O-methylcytidine-3'-phosphate
  modified_base 15: mod_base = OTHER; note = 2'-deoxy-2'-fluorouridine-3'-phosphate
  modified_base 16: mod_base = OTHER; note = 2'-O-methylcytidine-3'-phosphate
  modified_base 17: mod_base = OTHER; note = 2'-deoxy-2'-fluorouridine-3'-phosphate
  modified_base 18: mod_base = OTHER; note = 2'-O-methyladenosine-3'-phosphate
  modified_base 19: mod_base = OTHER; note = 2'-deoxy-2'-fluorouridine-3'-phosphate
  modified_base 20: mod_base = OTHER; note = 2'-O-methyladenosine-3'-phosphate
  modified_base 21: mod_base = OTHER; note = 2'-deoxy-2'-fluoroadenosine-3'-phosphate ((2S,4R)-1-[29-[[2-(acetylamino)-2-deoxy-beta-D-galactopyra nosyl]oxy]-14,14-bis[[3-[[3-[[5-[[2-(acetylamino)-2-deoxy-b eta-D-galactopyranosyl]oxy]-1-oxopentyl]amino]propyl]amino] -3-oxopropoxy]methyl]-1,12,19,25-tetraoxo-16-oxa-13,20,24-t riazanonacos-1-yl]-4-hydroxy-2-pyrrolidinyl)methyl ester
aacagtgttcttgctctataa

SEQ ID NO: 211 - RNA, 21 nt, synthetic construct
  source 1..21: mol_type = other RNA
  modified_base 1: mod_base = OTHER; note = 5'-deoxy-5'-(N-morpholinyl)-2'-O,4'-C-methylene uridine-3'-phosphorothioate
  modified_base 2: mod_base = OTHER; note = 2'-O-methylguanosine-3'-phosphorothioate
  modified_base 3: mod_base = OTHER; note = 2'-deoxy-2'-fluoroguanosine-3'-phosphate
  modified_base 4: mod_base = OTHER; note = 2'-O-methyladenosine-3'-phosphate
  modified_base 5: mod_base = OTHER; note = 2'-deoxy-2'-fluoroadenosine-3'-phosphate
  modified_base 6: mod_base = OTHER; note = 2'-O-methylguanosine-3'-phosphate
  modified_base 7: mod_base = OTHER; note = 2'-deoxy-2'-fluorocytidine-3'-phosphate
  modified_base 8: mod_base = OTHER; note = 2'-O-methyladenosine-3'-phosphate
  modified_base 9: mod_base = OTHER; note = 2'-deoxy-2'-fluoroguanosine-3'-phosphate
  modified_base 10: mod_base = OTHER; note = 2'-deoxy-2'-fluorouridine-3'-phosphate
  modified_base 11: mod_base = OTHER; note = 2'-deoxy-2'-fluoroadenosine-3'-phosphate
  modified_base 12: mod_base = OTHER; note = 2'-O-methyluridine-3'-phosphate
  modified_base 13: mod_base = OTHER; note = 2'-deoxy-2'-fluoroguanosine-3'-phosphate
  modified_base 14: mod_base = OTHER; note = 2'-O-methyluridine-3'-phosphate
  modified_base 15: mod_base = OTHER; note = 2'-deoxy-2'-fluorouridine-3'-phosphate
  modified_base 16: mod_base = OTHER; note = 2'-O-methylguanosine-3'-phosphate
  modified_base 17: mod_base = OTHER; note = 2'-deoxy-2'-fluoroadenosine-3'-phosphate
  modified_base 18: mod_base = OTHER; note = 2'-O-methyluridine-3'-phosphate
  modified_base 19: mod_base = OTHER; note = 2'-deoxy-2'-fluoroguanosine-3'-phosphate
  modified_base 20: mod_base = OTHER; note = 2'-O-methylguanosine-3'-phosphate
  modified_base 21: mod_base = OTHER; note = 2'-deoxy-2'-fluoroadenosine-3'-phosphate ((2S,4R)-1-[29-[[2-(acetylamino)-2-deoxy-beta-D-galactopyra nosyl]oxy]-14,14-bis[[3-[[3-[[5-[[2-(acetylamino)-2-deoxy-b eta-D-galactopyranosyl]oxy]-1-oxopentyl]amino]propyl]amino] -3-oxopropoxy]methyl]-1,12,19,25-tetraoxo-16-oxa-13,20,24-t riazanonacos-1-yl]-4-hydroxy-2-pyrrolidinyl)methyl ester
tggaagcagtatgttgatgga

SEQ ID NO: 212 - RNA, 21 nt, synthetic construct
  source 1..21: mol_type = other RNA
  modified_base 1: mod_base = OTHER; note = 5'-deoxy-5'-(N-morpholinyl)-2'-O,4'-C-methylene uridine-3'-phosphate
  modified_base 2: mod_base = OTHER; note = 2'-O-methylguanosine-3'-phosphorothioate
  modified_base 3: mod_base = OTHER; note = 2'-deoxy-2'-fluoroguanosine-3'-phosphate
  modified_base 4: mod_base = OTHER; note = 2'-O-methyladenosine-3'-phosphate
  modified_base 5: mod_base = OTHER; note = 2'-deoxy-2'-fluoroadenosine-3'-phosphate
  modified_base 6: mod_base = OTHER; note = 2'-O-methylguanosine-3'-phosphate
  modified_base 7: mod_base = OTHER; note = 2'-deoxy-2'-fluorocytidine-3'-phosphate
  modified_base 8: mod_base = OTHER; note = 2'-O-methyladenosine-3'-phosphate
  modified_base 9: mod_base = OTHER; note = 2'-deoxy-2'-fluoroguanosine-3'-phosphate
  modified_base 10: mod_base = OTHER; note = 2'-deoxy-2'-fluorouridine-3'-phosphate
  modified_base 11: mod_base = OTHER; note = 2'-deoxy-2'-fluoroadenosine-3'-phosphate
  modified_base 12: mod_base = OTHER; note = 2'-O-methyluridine-3'-phosphate
  modified_base 13: mod_base = OTHER; note = 2'-deoxy-2'-fluoroguanosine-3'-phosphate
  modified_base 14: mod_base = OTHER; note = 2'-O-methyluridine-3'-phosphate
  modified_base 15: mod_base = OTHER; note = 2'-deoxy-2'-fluorouridine-3'-phosphate
  modified_base 16: mod_base = OTHER; note = 2'-O-methylguanosine-3'-phosphate
  modified_base 17: mod_base = OTHER; note = 2'-deoxy-2'-fluoroadenosine-3'-phosphate
  modified_base 18: mod_base = OTHER; note = 2'-O-methyluridine-3'-phosphate
  modified_base 19: mod_base = OTHER; note = 2'-deoxy-2'-fluoroguanosine-3'-phosphate
  modified_base 20: mod_base = OTHER; note = 2'-O-methylguanosine-3'-phosphate
  modified_base 21: mod_base = OTHER; note = 2'-deoxy-2'-fluoroadenosine-3'-phosphate ((2S,4R)-1-[29-[[2-(acetylamino)-2-deoxy-beta-D-galactopyra nosyl]oxy]-14,14-bis[[3-[[3-[[5-[[2-(acetylamino)-2-deoxy-b eta-D-galactopyranosyl]oxy]-1-oxopentyl]amino]propyl]amino] -3-oxopropoxy]methyl]-1,12,19,25-tetraoxo-16-oxa-13,20,24-t riazanonacos-1-yl]-4-hydroxy-2-pyrrolidinyl)methyl ester
tggaagcagtatgttgatgga

SEQ ID NO: 213 - RNA, 21 nt, synthetic construct
  source 1..21: mol_type = other RNA
  modified_base 1: mod_base = OTHER; note = 5'-deoxy-5'-(N-morpholinyl)-2'-O,4'-C-methylene uridine-3'-phosphate
  modified_base 2: mod_base = OTHER; note = 2'-O-methylguanosine-3'-phosphate
  modified_base 3: mod_base = OTHER; note = 2'-deoxy-2'-fluoroguanosine-3'-phosphate
  modified_base 4: mod_base = OTHER; note = 2'-O-methyladenosine-3'-phosphate
  modified_base 5: mod_base = OTHER; note = 2'-deoxy-2'-fluoroadenosine-3'-phosphate
  modified_base 6: mod_base = OTHER; note = 2'-O-methylguanosine-3'-phosphate
  modified_base 7: mod_base = OTHER; note = 2'-deoxy-2'-fluorocytidine-3'-phosphate
  modified_base 8: mod_base = OTHER; note = 2'-O-methyladenosine-3'-phosphate
  modified_base 9: mod_base = OTHER; note = 2'-deoxy-2'-fluoroguanosine-3'-phosphate
  modified_base 10: mod_base = OTHER; note = 2'-deoxy-2'-fluorouridine-3'-phosphate
  modified_base 11: mod_base = OTHER; note = 2'-deoxy-2'-fluoroadenosine-3'-phosphate
  modified_base 12: mod_base = OTHER; note = 2'-O-methyluridine-3'-phosphate
  modified_base 13: mod_base = OTHER; note = 2'-deoxy-2'-fluoroguanosine-3'-phosphate
  modified_base 14: mod_base = OTHER; note = 2'-O-methyluridine-3'-phosphate
  modified_base 15: mod_base = OTHER; note = 2'-deoxy-2'-fluorouridine-3'-phosphate
  modified_base 16: mod_base = OTHER; note = 2'-O-methylguanosine-3'-phosphate
  modified_base 17: mod_base = OTHER; note = 2'-deoxy-2'-fluoroadenosine-3'-phosphate
  modified_base 18: mod_base = OTHER; note = 2'-O-methyluridine-3'-phosphate
  modified_base 19: mod_base = OTHER; note = 2'-deoxy-2'-fluoroguanosine-3'-phosphate
  modified_base 20: mod_base = OTHER; note = 2'-O-methylguanosine-3'-phosphate
  modified_base 21: mod_base = OTHER; note = 2'-deoxy-2'-fluoroadenosine-3'-phosphate ((2S,4R)-1-[29-[[2-(acetylamino)-2-deoxy-beta-D-galactopyra nosyl]oxy]-14,14-bis[[3-[[3-[[5-[[2-(acetylamino)-2-deoxy-b eta-D-galactopyranosyl]oxy]-1-oxopentyl]amino]propyl]amino] -3-oxopropoxy]methyl]-1,12,19,25-tetraoxo-16-oxa-13,20,24-t riazanonacos-1-yl]-4-hydroxy-2-pyrrolidinyl)methyl ester
tggaagcagtatgttgatgga

SEQ ID NO: 214 - RNA, 21 nt, synthetic construct
  source 1..21: mol_type = other RNA
  modified_base 1: mod_base = OTHER; note = 5'-deoxy-5'-(N-morpholinyl)-2'-O,4'-C-methylene uridine-3'-phosphorothioate
  modified_base 2: mod_base = OTHER; note = 2'-O-methylguanosine-3'-phosphate
  modified_base 3: mod_base = OTHER; note = 2'-deoxy-2'-fluoroguanosine-3'-phosphate
  modified_base 4: mod_base = OTHER; note = 2'-O-methyladenosine-3'-phosphate
  modified_base 5: mod_base = OTHER; note = 2'-deoxy-2'-fluoroadenosine-3'-phosphate
  modified_base 6: mod_base = OTHER; note = 2'-O-methylguanosine-3'-phosphate
  modified_base 7: mod_base = OTHER; note = 2'-deoxy-2'-fluorocytidine-3'-phosphate
  modified_base 8: mod_base = OTHER; note = 2'-O-methyladenosine-3'-phosphate
  modified_base 9: mod_base = OTHER; note = 2'-deoxy-2'-fluoroguanosine-3'-phosphate
  modified_base 10: mod_base = OTHER; note = 2'-deoxy-2'-fluorouridine-3'-phosphate
  modified_base 11: mod_base = OTHER; note = 2'-deoxy-2'-fluoroadenosine-3'-phosphate
  modified_base 12: mod_base = OTHER; note = 2'-O-methyluridine-3'-phosphate
  modified_base 13: mod_base = OTHER; note = 2'-deoxy-2'-fluoroguanosine-3'-phosphate
  modified_base 14: mod_base = OTHER; note = 2'-O-methyluridine-3'-phosphate
  modified_base 15: mod_base = OTHER; note = 2'-deoxy-2'-fluorouridine-3'-phosphate
  modified_base 16: mod_base = OTHER; note = 2'-O-methylguanosine-3'-phosphate
  modified_base 17: mod_base = OTHER; note = 2'-deoxy-2'-fluoroadenosine-3'-phosphate
  modified_base 18: mod_base = OTHER; note = 2'-O-methyluridine-3'-phosphate
  modified_base 19: mod_base = OTHER; note = 2'-deoxy-2'-fluoroguanosine-3'-phosphate
  modified_base 20: mod_base = OTHER; note = 2'-O-methylguanosine-3'-phosphate
  modified_base 21: mod_base = OTHER; note = 2'-deoxy-2'-fluoroadenosine-3'-phosphate ((2S,4R)-1-[29-[[2-(acetylamino)-2-deoxy-beta-D-galactopyra nosyl]oxy]-14,14-bis[[3-[[3-[[5-[[2-(acetylamino)-2-deoxy-b eta-D-galactopyranosyl]oxy]-1-oxopentyl]amino]propyl]amino] -3-oxopropoxy]methyl]-1,12,19,25-tetraoxo-16-oxa-13,20,24-t riazanonacos-1-yl]-4-hydroxy-2-pyrrolidinyl)methyl ester
tggaagcagtatgttgatgga

SEQ ID NO: 215 - RNA, 21 nt, synthetic construct
  source 1..21: mol_type = other RNA
  modified_base 1: mod_base = OTHER; note = 5'-deoxy-5'-(N-morpholinyl)-2'-O,4'-C-methylene uridine-3'-phosphorothioate
  modified_base 2: mod_base = OTHER; note = 2'-O-methylguanosine-3'-phosphorothioate
  modified_base 3: mod_base = OTHER; note = 2'-deoxy-2'-fluorouridine-3'-phosphate
  modified_base 4: mod_base = OTHER; note = 2'-O-methylguanosine-3'-phosphate
  modified_base 5: mod_base = OTHER; note = 2'-deoxy-2'-fluoroadenosine-3'-phosphate
  modified_base 6: mod_base = OTHER; note = 2'-O-methylcytidine-3'-phosphate
  modified_base 7: mod_base = OTHER; note = 2'-deoxy-2'-fluoroadenosine-3'-phosphate
  modified_base 8: mod_base = OTHER; note = 2'-O-methyladenosine-3'-phosphate
  modified_base 9: mod_base = OTHER; note = 2'-deoxy-2'-fluoroadenosine-3'-phosphate
  modified_base 10: mod_base = OTHER; note = 2'-deoxy-2'-fluorouridine-3'-phosphate
  modified_base 11: mod_base = OTHER; note = 2'-deoxy-2'-fluoroadenosine-3'-phosphate
  modified_base 12: mod_base = OTHER; note = 2'-O-methyluridine-3'-phosphate
  modified_base 13: mod_base = OTHER; note = 2'-deoxy-2'-fluoroguanosine-3'-phosphate
  modified_base 14: mod_base = OTHER; note = 2'-O-methylguanosine-3'-phosphate
  modified_base 15: mod_base = OTHER; note = 2'-deoxy-2'-fluoroguanosine-3'-phosphate
  modified_base 16: mod_base = OTHER; note = 2'-O-methylcytidine-3'-phosphate
  modified_base 17: mod_base = OTHER; note = 2'-deoxy-2'-fluoroadenosine-3'-phosphate
  modified_base 18: mod_base = OTHER; note = 2'-O-methyluridine-3'-phosphate
  modified_base 19: mod_base = OTHER; note = 2'-deoxy-2'-fluorocytidine-3'-phosphate
  modified_base 20: mod_base = OTHER; note = 2'-O-methyladenosine-3'-phosphate
  modified_base 21: mod_base = OTHER; note = 2'-deoxy-2'-fluoroadenosine-3'-phosphate ((2S,4R)-1-[29-[[2-(acetylamino)-2-deoxy-beta-D-galactopyra nosyl]oxy]-14,14-bis[[3-[[3-[[5-[[2-(acetylamino)-2-deoxy-b eta-D-galactopyranosyl]oxy]-1-oxopentyl]amino]propyl]amino] -3-oxopropoxy]methyl]-1,12,19,25-tetraoxo-16-oxa-13,20,24-t riazanonacos-1-yl]-4-hydroxy-2-pyrrolidinyl)methyl ester
tgtgacaaatatgggcatcaa

SEQ ID NO: 216 - RNA, 21 nt, synthetic construct
  source 1..21: mol_type = other RNA
  modified_base 1: mod_base = OTHER; note = 5'-deoxy-5'-(N-morpholinyl)-2'-O,4'-C-methylene uridine-3'-phosphate
  modified_base 2: mod_base = OTHER; note = 2'-O-methylguanosine-3'-phosphorothioate
  modified_base 3: mod_base = OTHER; note = 2'-deoxy-2'-fluorouridine-3'-phosphate
  modified_base 4: mod_base = OTHER; note = 2'-O-methylguanosine-3'-phosphate
  modified_base 5: mod_base = OTHER; note = 2'-deoxy-2'-fluoroadenosine-3'-phosphate
  modified_base 6: mod_base = OTHER; note = 2'-O-methylcytidine-3'-phosphate
  modified_base 7: mod_base = OTHER; note = 2'-deoxy-2'-fluoroadenosine-3'-phosphate
  modified_base 8: mod_base = OTHER; note = 2'-O-methyladenosine-3'-phosphate
  modified_base 9: mod_base = OTHER; note = 2'-deoxy-2'-fluoroadenosine-3'-phosphate
  modified_base 10: mod_base = OTHER; note = 2'-deoxy-2'-fluorouridine-3'-phosphate
  modified_base 11: mod_base = OTHER; note = 2'-deoxy-2'-fluoroadenosine-3'-phosphate
  modified_base 12: mod_base = OTHER; note = 2'-O-methyluridine-3'-phosphate
  modified_base 13: mod_base = OTHER; note = 2'-deoxy-2'-fluoroguanosine-3'-phosphate
  modified_base 14: mod_base = OTHER; note = 2'-O-methylguanosine-3'-phosphate
  modified_base 15: mod_base = OTHER; note = 2'-deoxy-2'-fluoroguanosine-3'-phosphate
  modified_base 16: mod_base = OTHER; note = 2'-O-methylcytidine-3'-phosphate
  modified_base 17: mod_base = OTHER; note = 2'-deoxy-2'-fluoroadenosine-3'-phosphate
  modified_base 18: mod_base = OTHER; note = 2'-O-methyluridine-3'-phosphate
  modified_base 19: mod_base = OTHER; note = 2'-deoxy-2'-fluorocytidine-3'-phosphate
  modified_base 20: mod_base = OTHER; note = 2'-O-methyladenosine-3'-phosphate
  modified_base 21: mod_base = OTHER; note = 2'-deoxy-2'-fluoroadenosine-3'-phosphate ((2S,4R)-1-[29-[[2-(acetylamino)-2-deoxy-beta-D-galactopyra nosyl]oxy]-14,14-bis[[3-[[3-[[5-[[2-(acetylamino)-2-deoxy-b eta-D-galactopyranosyl]oxy]-1-oxopentyl]amino]propyl]amino] -3-oxopropoxy]methyl]-1,12,19,25-tetraoxo-16-oxa-13,20,24-t riazanonacos-1-yl]-4-hydroxy-2-pyrrolidinyl)methyl ester
tgtgacaaatatgggcatcaa

SEQ ID NO: 217 - RNA, 21 nt, synthetic construct
  source 1..21: mol_type = other RNA
  modified_base 1: mod_base = OTHER; note = 5'-deoxy-5'-(N-morpholinyl)-2'-O,4'-C-methylene uridine-3'-phosphate
  modified_base 2: mod_base = OTHER; note = 2'-O-methylguanosine-3'-phosphate
  modified_base 3: mod_base = OTHER; note = 2'-deoxy-2'-fluorouridine-3'-phosphate
  modified_base 4: mod_base = OTHER; note = 2'-O-methylguanosine-3'-phosphate
  modified_base 5: mod_base = OTHER; note = 2'-deoxy-2'-fluoroadenosine-3'-phosphate
  modified_base 6: mod_base = OTHER; note = 2'-O-methylcytidine-3'-phosphate
  modified_base 7: mod_base = OTHER; note = 2'-deoxy-2'-fluoroadenosine-3'-phosphate
  modified_base 8: mod_base = OTHER; note = 2'-O-methyladenosine-3'-phosphate
  modified_base 9: mod_base = OTHER; note = 2'-deoxy-2'-fluoroadenosine-3'-phosphate
  modified_base 10: mod_base = OTHER; note = 2'-deoxy-2'-fluorouridine-3'-phosphate
  modified_base 11: mod_base = OTHER; note = 2'-deoxy-2'-fluoroadenosine-3'-phosphate
  modified_base 12: mod_base = OTHER; note = 2'-O-methyluridine-3'-phosphate
  modified_base 13: mod_base = OTHER; note = 2'-deoxy-2'-fluoroguanosine-3'-phosphate
  modified_base 14: mod_base = OTHER; note = 2'-O-methylguanosine-3'-phosphate
  modified_base 15: mod_base = OTHER; note = 2'-deoxy-2'-fluoroguanosine-3'-phosphate
  modified_base 16: mod_base = OTHER; note = 2'-O-methylcytidine-3'-phosphate
  modified_base 17: mod_base = OTHER; note = 2'-deoxy-2'-fluoroadenosine-3'-phosphate
  modified_base 18: mod_base = OTHER; note = 2'-O-methyluridine-3'-phosphate
  modified_base 19: mod_base = OTHER; note = 2'-deoxy-2'-fluorocytidine-3'-phosphate
  modified_base 20: mod_base = OTHER; note = 2'-O-methyladenosine-3'-phosphate
  modified_base 21: mod_base = OTHER; note = 2'-deoxy-2'-fluoroadenosine-3'-phosphate ((2S,4R)-1-[29-[[2-(acetylamino)-2-deoxy-beta-D-galactopyra nosyl]oxy]-14,14-bis[[3-[[3-[[5-[[2-(acetylamino)-2-deoxy-b eta-D-galactopyranosyl]oxy]-1-oxopentyl]amino]propyl]amino] -3-oxopropoxy]methyl]-1,12,19,25-tetraoxo-16-oxa-13,20,24-t riazanonacos-1-yl]-4-hydroxy-2-pyrrolidinyl)methyl ester
tgtgacaaatatgggcatcaa

SEQ ID NO: 218 - RNA, 21 nt, synthetic construct
  source 1..21: mol_type = other RNA
  modified_base 1: mod_base = OTHER; note = 5'-deoxy-5'-(N-morpholinyl)-2'-O,4'-C-methylene uridine-3'-phosphorothioate
  modified_base 2: mod_base = OTHER; note = 2'-O-methylguanosine-3'-phosphate
  modified_base 3: mod_base = OTHER; note = 2'-deoxy-2'-fluorouridine-3'-phosphate
  modified_base 4: mod_base = OTHER; note = 2'-O-methylguanosine-3'-phosphate
  modified_base 5: mod_base = OTHER; note = 2'-deoxy-2'-fluoroadenosine-3'-phosphate
  modified_base 6: mod_base = OTHER; note = 2'-O-methylcytidine-3'-phosphate
  modified_base 7: mod_base = OTHER; note = 2'-deoxy-2'-fluoroadenosine-3'-phosphate
  modified_base 8: mod_base = OTHER; note = 2'-O-methyladenosine-3'-phosphate
  modified_base 9: mod_base = OTHER; note = 2'-deoxy-2'-fluoroadenosine-3'-phosphate
  modified_base 10: mod_base = OTHER; note = 2'-deoxy-2'-fluorouridine-3'-phosphate
  modified_base 11: mod_base = OTHER; note = 2'-deoxy-2'-fluoroadenosine-3'-phosphate
  modified_base 12: mod_base = OTHER; note = 2'-O-methyluridine-3'-phosphate
  modified_base 13: mod_base = OTHER; note = 2'-deoxy-2'-fluoroguanosine-3'-phosphate
  modified_base 14: mod_base = OTHER; note = 2'-O-methylguanosine-3'-phosphate
  modified_base 15: mod_base = OTHER; note = 2'-deoxy-2'-fluoroguanosine-3'-phosphate
  modified_base 16: mod_base = OTHER; note = 2'-O-methylcytidine-3'-phosphate
  modified_base 17: mod_base = OTHER; note = 2'-deoxy-2'-fluoroadenosine-3'-phosphate
  modified_base 18: mod_base = OTHER; note = 2'-O-methyluridine-3'-phosphate
  modified_base 19: mod_base = OTHER; note = 2'-deoxy-2'-fluorocytidine-3'-phosphate
  modified_base 20: mod_base = OTHER; note = 2'-O-methyladenosine-3'-phosphate
  modified_base 21: mod_base = OTHER; note = 2'-deoxy-2'-fluoroadenosine-3'-phosphate ((2S,4R)-1-[29-[[2-(acetylamino)-2-deoxy-beta-D-galactopyra nosyl]oxy]-14,14-bis[[3-[[3-[[5-[[2-(acetylamino)-2-deoxy-b eta-D-galactopyranosyl]oxy]-1-oxopentyl]amino]propyl]amino] -3-oxopropoxy]methyl]-1,12,19,25-tetraoxo-16-oxa-13,20,24-t riazanonacos-1-yl]-4-hydroxy-2-pyrrolidinyl)methyl ester
tgtgacaaatatgggcatcaa

SEQ ID NO: 219 - RNA, 21 nt, synthetic construct
  source 1..21: mol_type = other RNA
  modified_base 1: mod_base = OTHER; note = 2'-O,4'-C-methylene adenosine-3'-phosphorothioate
  modified_base 2: mod_base = OTHER; note = 2'-O-methyladenosine-3'-phosphorothioate
  modified_base 3: mod_base = OTHER; note = 2'-deoxy-2'-fluorocytidine-3'-phosphate
  modified_base 4: mod_base = OTHER; note = 2'-O-methyladenosine-3'-phosphate
  modified_base 5: mod_base = OTHER; note = 2'-deoxy-2'-fluoroguanosine-3'-phosphate
  modified_base 6: mod_base = OTHER; note = 2'-O-methyluridine-3'-phosphate
  modified_base 7: mod_base = OTHER; note = 2'-deoxy-2'-fluoroguanosine-3'-phosphate
  modified_base 8: mod_base = OTHER; note = 2'-O-methyluridine-3'-phosphate
  modified_base 9: mod_base = OTHER; note = 2'-deoxy-2'-fluorouridine-3'-phosphate
  modified_base 10: mod_base = OTHER; note = 2'-deoxy-2'-fluorocytidine-3'-phosphate
  modified_base 11: mod_base = OTHER; note = 2'-deoxy-2'-fluorouridine-3'-phosphate
  modified_base 12: mod_base = OTHER; note = 2'-O-methyluridine-3'-phosphate
  modified_base 13: mod_base = OTHER; note = 2'-deoxy-2'-fluoroguanosine-3'-phosphate
  modified_base 14: mod_base = OTHER; note = 2'-O-methylcytidine-3'-phosphate
  modified_base 15: mod_base = OTHER; note = 2'-deoxy-2'-fluorouridine-3'-phosphate
  modified_base 16: mod_base = OTHER; note = 2'-O-methylcytidine-3'-phosphate
  modified_base 17: mod_base = OTHER; note = 2'-deoxy-2'-fluorouridine-3'-phosphate
  modified_base 18: mod_base = OTHER; note = 2'-O-methyladenosine-3'-phosphate
  modified_base 19: mod_base = OTHER; note = 2'-deoxy-2'-fluorouridine-3'-phosphate
  modified_base 20: mod_base = OTHER; note = 2'-O-methyladenosine-3'-phosphate
  modified_base 21: mod_base = OTHER; note = 2'-deoxy-2'-fluoroadenosine-3'-phosphate ((2S,4R)-1-[29-[[2-(acetylamino)-2-deoxy-beta-D-galactopyra nosyl]oxy]-14,14-bis[[3-[[3-[[5-[[2-(acetylamino)-2-deoxy-b eta-D-galactopyranosyl]oxy]-1-oxopentyl]amino]propyl]amino] -3-oxopropoxy]methyl]-1,12,19,25-tetraoxo-16-oxa-13,20,24-t riazanonacos-1-yl]-4-hydroxy-2-pyrrolidinyl)methyl ester
aacagtgttcttgctctataa

SEQ ID NO: 220 - RNA, 21 nt, synthetic construct
  source 1..21: mol_type = other RNA
  modified_base 1: mod_base = OTHER; note = 2'-O,4'-C-methylene adenosine-3'-phosphate
  modified_base 2: mod_base = OTHER; note = 2'-O-methyladenosine-3'-phosphorothioate
  modified_base 3: mod_base = OTHER; note = 2'-deoxy-2'-fluorocytidine-3'-phosphate
  modified_base 4: mod_base = OTHER; note = 2'-O-methyladenosine-3'-phosphate
  modified_base 5: mod_base = OTHER; note = 2'-deoxy-2'-fluoroguanosine-3'-phosphate
  modified_base 6: mod_base = OTHER; note = 2'-O-methyluridine-3'-phosphate
  modified_base 7: mod_base = OTHER; note = 2'-deoxy-2'-fluoroguanosine-3'-phosphate
  modified_base 8: mod_base = OTHER; note = 2'-O-methyluridine-3'-phosphate
  modified_base 9: mod_base = OTHER; note = 2'-deoxy-2'-fluorouridine-3'-phosphate
  modified_base 10: mod_base = OTHER; note = 2'-deoxy-2'-fluorocytidine-3'-phosphate
  modified_base 11: mod_base = OTHER; note = 2'-deoxy-2'-fluorouridine-3'-phosphate
  modified_base 12: mod_base = OTHER; note = 2'-O-methyluridine-3'-phosphate
  modified_base 13: mod_base = OTHER; note = 2'-deoxy-2'-fluoroguanosine-3'-phosphate
  modified_base 14: mod_base = OTHER; note = 2'-O-methylcytidine-3'-phosphate
  modified_base 15: mod_base = OTHER; note = 2'-deoxy-2'-fluorouridine-3'-phosphate
  modified_base 16: mod_base = OTHER; note = 2'-O-methylcytidine-3'-phosphate
  modified_base 17: mod_base = OTHER; note = 2'-deoxy-2'-fluorouridine-3'-phosphate
  modified_base 18: mod_base = OTHER; note = 2'-O-methyladenosine-3'-phosphate
  modified_base 19: mod_base = OTHER; note = 2'-deoxy-2'-fluorouridine-3'-phosphate
  modified_base 20: mod_base = OTHER; note = 2'-O-methyladenosine-3'-phosphate
  modified_base 21: mod_base = OTHER; note = 2'-deoxy-2'-fluoroadenosine-3'-phosphate ((2S,4R)-1-[29-[[2-(acetylamino)-2-deoxy-beta-D-galactopyra nosyl]oxy]-14,14-bis[[3-[[3-[[5-[[2-(acetylamino)-2-deoxy-b eta-D-galactopyranosyl]oxy]-1-oxopentyl]amino]propyl]amino] -3-oxopropoxy]methyl]-1,12,19,25-tetraoxo-16-oxa-13,20,24-t riazanonacos-1-yl]-4-hydroxy-2-pyrrolidinyl)methyl ester
aacagtgttcttgctctataa

SEQ ID NO: 221 - RNA, 21 nt, synthetic construct
  source 1..21: mol_type = other RNA
  modified_base 1: mod_base = OTHER; note = 2'-O,4'-C-methylene adenosine-3'-phosphate
  modified_base 2: mod_base = OTHER; note = 2'-O-methyladenosine-3'-phosphate
  modified_base 3: mod_base = OTHER; note = 2'-deoxy-2'-fluorocytidine-3'-phosphate
  modified_base 4: mod_base = OTHER; note = 2'-O-methyladenosine-3'-phosphate
  modified_base 5: mod_base = OTHER; note = 2'-deoxy-2'-fluoroguanosine-3'-phosphate
  modified_base 6: mod_base = OTHER; note = 2'-O-methyluridine-3'-phosphate
  modified_base 7: mod_base = OTHER; note = 2'-deoxy-2'-fluoroguanosine-3'-phosphate
  modified_base 8: mod_base = OTHER; note = 2'-O-methyluridine-3'-phosphate
  modified_base 9: mod_base = OTHER; note = 2'-deoxy-2'-fluorouridine-3'-phosphate
  modified_base 10: mod_base = OTHER; note = 2'-deoxy-2'-fluorocytidine-3'-phosphate
  modified_base 11: mod_base = OTHER; note = 2'-deoxy-2'-fluorouridine-3'-phosphate
  modified_base 12: mod_base = OTHER; note = 2'-O-methyluridine-3'-phosphate
  modified_base 13: mod_base = OTHER; note = 2'-deoxy-2'-fluoroguanosine-3'-phosphate
  modified_base 14: mod_base = OTHER; note = 2'-O-methylcytidine-3'-phosphate
  modified_base 15: mod_base = OTHER; note = 2'-deoxy-2'-fluorouridine-3'-phosphate
  modified_base 16: mod_base = OTHER; note = 2'-O-methylcytidine-3'-phosphate
  modified_base 17: mod_base = OTHER; note = 2'-deoxy-2'-fluorouridine-3'-phosphate
  modified_base 18: mod_base = OTHER; note = 2'-O-methyladenosine-3'-phosphate
  modified_base 19: mod_base = OTHER; note = 2'-deoxy-2'-fluorouridine-3'-phosphate
  modified_base 20: mod_base = OTHER; note = 2'-O-methyladenosine-3'-phosphate
  modified_base 21: mod_base = OTHER; note = 2'-deoxy-2'-fluoroadenosine-3'-phosphate ((2S,4R)-1-[29-[[2-(acetylamino)-2-deoxy-beta-D-galactopyra nosyl]oxy]-14,14-bis[[3-[[3-[[5-[[2-(acetylamino)-2-deoxy-b eta-D-galactopyranosyl]oxy]-1-oxopentyl]amino]propyl]amino] -3-oxopropoxy]methyl]-1,12,19,25-tetraoxo-16-oxa-13,20,24-t riazanonacos-1-yl]-4-hydroxy-2-pyrrolidinyl)methyl ester
aacagtgttcttgctctataa

SEQ ID NO: 222 - RNA, 21 nt, synthetic construct
  source 1..21: mol_type = other RNA
  modified_base 1: mod_base = OTHER; note = 2'-O,4'-C-methylene adenosine-3'-phosphorothioate
  modified_base 2: mod_base = OTHER; note = 2'-O-methyladenosine-3'-phosphate
  modified_base 3: mod_base = OTHER; note = 2'-deoxy-2'-fluorocytidine-3'-phosphate
  modified_base 4: mod_base = OTHER; note = 2'-O-methyladenosine-3'-phosphate
  modified_base 5: mod_base = OTHER; note = 2'-deoxy-2'-fluoroguanosine-3'-phosphate
  modified_base 6: mod_base = OTHER; note = 2'-O-methyluridine-3'-phosphate
  modified_base 7: mod_base = OTHER; note = 2'-deoxy-2'-fluoroguanosine-3'-phosphate
  modified_base 8: mod_base = OTHER; note = 2'-O-methyluridine-3'-phosphate
  modified_base 9: mod_base = OTHER; note = 2'-deoxy-2'-fluorouridine-3'-phosphate
  modified_base 10: mod_base = OTHER; note = 2'-deoxy-2'-fluorocytidine-3'-phosphate
  modified_base 11: mod_base = OTHER; note = 2'-deoxy-2'-fluorouridine-3'-phosphate
  modified_base 12: mod_base = OTHER; note = 2'-O-methyluridine-3'-phosphate
  modified_base 13: mod_base = OTHER; note = 2'-deoxy-2'-fluoroguanosine-3'-phosphate
  modified_base 14: mod_base = OTHER; note = 2'-O-methylcytidine-3'-phosphate
  modified_base 15: mod_base = OTHER; note = 2'-deoxy-2'-fluorouridine-3'-phosphate
  modified_base 16: mod_base = OTHER; note = 2'-O-methylcytidine-3'-phosphate
  modified_base 17: mod_base = OTHER; note = 2'-deoxy-2'-fluorouridine-3'-phosphate
  modified_base 18: mod_base = OTHER; note = 2'-O-methyladenosine-3'-phosphate
  modified_base 19: mod_base = OTHER; note = 2'-deoxy-2'-fluorouridine-3'-phosphate
  modified_base 20: mod_base = OTHER; note = 2'-O-methyladenosine-3'-phosphate
  modified_base 21: mod_base = OTHER; note = 2'-deoxy-2'-fluoroadenosine-3'-phosphate ((2S,4R)-1-[29-[[2-(acetylamino)-2-deoxy-beta-D-galactopyra nosyl]oxy]-14,14-bis[[3-[[3-[[5-[[2-(acetylamino)-2-deoxy-b eta-D-galactopyranosyl]oxy]-1-oxopentyl]amino]propyl]amino] -3-oxopropoxy]methyl]-1,12,19,25-tetraoxo-16-oxa-13,20,24-t riazanonacos-1-yl]-4-hydroxy-2-pyrrolidinyl)methyl ester
aacagtgttcttgctctataa

SEQ ID NO: 223 - RNA, 21 nt, synthetic construct
  source 1..21: mol_type = other RNA
  modified_base 1: mod_base = OTHER; note = 2'-deoxy-2'-fluoroadenosine-3'-phosphorothioate
  modified_base 2: mod_base = OTHER; note = 2'-O-methyladenosine-3'-phosphorothioate
  modified_base 3: mod_base = OTHER; note = 2'-deoxy-2'-fluorocytidine-3'-phosphate
  modified_base 4: mod_base = OTHER; note = 2'-O-methyladenosine-3'-phosphate
  modified_base 5: mod_base = OTHER; note = 2'-deoxy-2'-fluoroguanosine-3'-phosphate
  modified_base 6: mod_base = OTHER; note = 2'-O-methyluridine-3'-phosphate
  modified_base 7: mod_base = OTHER; note = 2'-deoxy-2'-fluoroguanosine-3'-phosphate
  modified_base 8: mod_base = OTHER; note = 2'-O-methyluridine-3'-phosphate
  modified_base 9: mod_base = OTHER; note = 2'-deoxy-2'-fluorouridine-3'-phosphate
  modified_base 10: mod_base = OTHER; note = 2'-deoxy-2'-fluorocytidine-3'-phosphate
  modified_base 11: mod_base = OTHER; note = 2'-deoxy-2'-fluorouridine-3'-phosphate
  modified_base 12: mod_base = OTHER; note = 2'-O-methyluridine-3'-phosphate
  modified_base 13: mod_base = OTHER; note = 2'-deoxy-2'-fluoroguanosine-3'-phosphate
  modified_base 14: mod_base = OTHER; note = 2'-O-methylcytidine-3'-phosphate
  modified_base 15: mod_base = OTHER; note = 2'-deoxy-2'-fluorouridine-3'-phosphate
  modified_base 16: mod_base = OTHER; note = 2'-O-methylcytidine-3'-phosphate
  modified_base 17: mod_base = OTHER; note = 2'-deoxy-2'-fluorouridine-3'-phosphate
  modified_base 18: mod_base = OTHER; note = 2'-O-methyladenosine-3'-phosphate
  modified_base 19: mod_base = OTHER; note = 2'-deoxy-2'-fluorouridine-3'-phosphate
  modified_base 20: mod_base = OTHER; note = 2'-O-methyladenosine-3'-phosphate
  modified_base 21: mod_base = OTHER; note = 2'-deoxy-2'-fluoroadenosine-3'-phosphate ((2S,4R)-1-[29-[[2-(acetylamino)-2-deoxy-beta-D-galactopyra nosyl]oxy]-14,14-bis[[3-[[3-[[5-[[2-(acetylamino)-2-deoxy-b eta-D-galactopyranosyl]oxy]-1-oxopentyl]amino]propyl]amino] -3-oxopropoxy]methyl]-1,12,19,25-tetraoxo-16-oxa-13,20,24-t riazanonacos-1-yl]-4-hydroxy-2-pyrrolidinyl)methyl ester
aacagtgttcttgctctataa

SEQ ID NO: 224 - RNA, 23 nt, synthetic construct
  source 1..23: mol_type = other RNA
  modified_base 1: mod_base = OTHER; note = 2'-O-methyluridine-3'-phosphorothioate
  modified_base 2: mod_base = OTHER; note = 2'-deoxy-2'-fluorouridine-3'-phosphorothioate
  modified_base 3: mod_base = OTHER; note = 2'-O-methyladenosine-3'-phosphate
  modified_base 4: mod_base = OTHER; note = 2'-deoxy-2'-fluorouridine-3'-phosphate
  modified_base 5: mod_base = OTHER; note = 2'-O-methyladenosine-3'-phosphate
  modified_base 6: mod_base = OTHER; note = 2'-deoxy-2'-fluoroguanosine-3'-phosphate
  modified_base 7: mod_base = OTHER; note = 2'-O-methyladenosine-3'-phosphate
  modified_base 8: mod_base = OTHER; note = 2'-deoxy-2'-fluoroguanosine-3'-phosphate
  modified_base 9: mod_base = OTHER; note = 2'-O-methylcytidine-3'-phosphate
  modified_base 10: mod_base = OTHER; note = 2'-deoxy-2'-fluoroadenosine-3'-phosphate
  modified_base 11: mod_base = OTHER; note = 2'-O-methyladenosine-3'-phosphate
  modified_base 12: mod_base = OTHER; note = 2'-O-methylguanosine-3'-phosphate
  modified_base 13: mod_base = OTHER; note = 2'-O-methyladenosine-3'-phosphate
  modified_base 14: mod_base = OTHER; note = 2'-deoxy-2'-fluoroadenosine-3'-phosphate
  modified_base 15: mod_base = OTHER; note = 2'-O-methylcytidine-3'-phosphate
  modified_base 16: mod_base = OTHER; note = 2'-deoxy-2'-fluoroadenosine-3'-phosphate
  modified_base 17: mod_base = OTHER; note = 2'-O-methylcytidine-3'-phosphate
  modified_base 18: mod_base = OTHER; note = 2'-deoxy-2'-fluorouridine-3'-phosphate
  modified_base 19: mod_base = OTHER; note = 2'-O-methylguanosine-3'-phosphate
  modified_base 20: mod_base = OTHER; note = 2'-deoxy-2'-fluorouridine-3'-phosphate
  modified_base 21: mod_base = OTHER; note = 2'-O-methyluridine-3'-phosphorothioate
  modified_base 22: mod_base = OTHER; note = 2'-O-methyluridine-3'-phosphorothioate
  modified_base 23: mod_base = OTHER; note = 2'-O-methyluridine
ttatagagcaagaacactgtttt

SEQ ID NO: 225 - RNA, 21 nt, synthetic construct
  source 1..21: mol_type = other RNA
  modified_base 1: mod_base = OTHER; note = 2'-deoxy-2'-fluoroadenosine-3'-phosphorothioate
  modified_base 2: mod_base = OTHER; note = 2'-O-methyladenosine-3'-phosphorothioate
  modified_base 3: mod_base = OTHER; note = 2'-deoxy-2'-fluorocytidine-3'-phosphate
  modified_base 4: mod_base = OTHER; note = 2'-O-methyladenosine-3'-phosphate
  modified_base 5: mod_base = OTHER; note = 2'-deoxy-2'-fluoroguanosine-3'-phosphate
  modified_base 6: mod_base = OTHER; note = 2'-O-methyluridine-3'-phosphate
  modified_base 7: mod_base = OTHER; note = 2'-deoxy-2'-fluoroguanosine-3'-phosphate
  modified_base 8: mod_base = OTHER; note = 2'-O-methyluridine-3'-phosphate
  modified_base 9: mod_base = OTHER; note = 2'-deoxy-2'-fluorouridine-3'-phosphate
  modified_base 10: mod_base = OTHER; note = 2'-deoxy-2'-fluorocytidine-3'-phosphate
  modified_base 11: mod_base = OTHER; note = 2'-deoxy-2'-fluorouridine-3'-phosphate
  modified_base 12: mod_base = OTHER; note = 2'-O-methyluridine-3'-phosphate
  modified_base 13: mod_base = OTHER; note = 2'-deoxy-2'-fluoroguanosine-3'-phosphate
  modified_base 14: mod_base = OTHER; note = 2'-O-methylcytidine-3'-phosphate
  modified_base 15: mod_base = OTHER; note = 2'-deoxy-2'-fluorouridine-3'-phosphate
  modified_base 16: mod_base = OTHER; note = 2'-O-methylcytidine-3'-phosphate
  modified_base 17: mod_base = OTHER; note = 2'-deoxy-2'-fluorouridine-3'-phosphate
  modified_base 18: mod_base = OTHER; note = 2'-O-methyladenosine-3'-phosphate
  modified_base 19: mod_base = OTHER; note = 2'-deoxy-2'-fluorouridine-3'-phosphate
  modified_base 20: mod_base = OTHER; note = 2'-O-methyladenosine-3'-phosphate
  modified_base 21: mod_base = OTHER; note = 2'-deoxy-2'-fluoroadenosine-3'-phosphate ((2S,4R)-1-[29-[[2-(acetylamino)-2-deoxy-beta-D-galactopyra nosyl]oxy]-14,14-bis[[3-[[3-[[5-[[2-(acetylamino)-2-deoxy-b eta-D-galactopyranosyl]oxy]-1-oxopentyl]amino]propyl]amino] -3-oxopropoxy]methyl]-1,12,19,25-tetraoxo-16-oxa-13,20,24-t riazanonacos-1-yl]-4-hydroxy-2-pyrrolidinyl)methyl ester
aacagtgttcttgctctataa

SEQ ID NO: 226 - RNA, 23 nt, synthetic construct
  source 1..23: mol_type = other RNA
  modified_base 1: mod_base = OTHER; note = 2'-O-methyluridine-3'-phosphorothioate 5'-(E)-Vinylphosphonate
  modified_base 2: mod_base = OTHER; note = 2'-deoxy-2'-fluorouridine-3'-phosphorothioate
  modified_base 3: mod_base = OTHER; note = 2'-O-methyladenosine-3'-phosphate
  modified_base 4: mod_base = OTHER; note = 2'-deoxy-2'-fluorouridine-3'-phosphate
  modified_base 5: mod_base = OTHER; note = 2'-O-methyladenosine-3'-phosphate
  modified_base 6: mod_base = OTHER; note = 2'-deoxy-2'-fluoroguanosine-3'-phosphate
  modified_base 7: mod_base = OTHER; note = 2'-O-methyladenosine-3'-phosphate
  modified_base 8: mod_base = OTHER; note = 2'-deoxy-2'-fluoroguanosine-3'-phosphate
  modified_base 9: mod_base = OTHER; note = 2'-O-methylcytidine-3'-phosphate
  modified_base 10: mod_base = OTHER; note = 2'-deoxy-2'-fluoroadenosine-3'-phosphate
  modified_base 11: mod_base = OTHER; note = 2'-O-methyladenosine-3'-phosphate
  modified_base 12: mod_base = OTHER; note = 2'-O-methylguanosine-3'-phosphate
  modified_base 13: mod_base = OTHER; note = 2'-O-methyladenosine-3'-phosphate
  modified_base 14: mod_base = OTHER; note = 2'-deoxy-2'-fluoroadenosine-3'-phosphate
  modified_base 15: mod_base = OTHER; note = 2'-O-methylcytidine-3'-phosphate
  modified_base 16: mod_base = OTHER; note = 2'-deoxy-2'-fluoroadenosine-3'-phosphate
  modified_base 17: mod_base = OTHER; note = 2'-O-methylcytidine-3'-phosphate
  modified_base 18: mod_base = OTHER; note = 2'-deoxy-2'-fluorouridine-3'-phosphate
  modified_base 19: mod_base = OTHER; note = 2'-O-methylguanosine-3'-phosphate
  modified_base 20: mod_base = OTHER; note = 2'-deoxy-2'-fluorouridine-3'-phosphate
  modified_base 21: mod_base = OTHER; note = 2'-O-methyluridine-3'-phosphorothioate
  modified_base 22: mod_base = OTHER; note = 2'-O-methyluridine-3'-phosphorothioate
  modified_base 23: mod_base = OTHER; note = 2'-O-methyluridine
ttatagagcaagaacactgtttt

SEQ ID NO: 227 - RNA, 21 nt, synthetic construct
  source 1..21: mol_type = other RNA
  modified_base 1: mod_base = OTHER; note = 5'-deoxy-5'-(N-morpholinyl)-2'-O,4'-C-methylene adenosine-3'-phosphate
  modified_base 2: mod_base = OTHER; note = 2'-O-methyladenosine-3'-phosphate
  modified_base 3: mod_base = OTHER; note = 2'-deoxy-2'-fluorocytidine-3'-phosphate
  modified_base 4: mod_base = OTHER; note = 2'-O-methyladenosine-3'-phosphate
  modified_base 5: mod_base = OTHER; note = 2'-deoxy-2'-fluoroguanosine-3'-phosphate
  modified_base 6: mod_base = OTHER; note = 2'-O-methyluridine-3'-phosphate
  modified_base 7: mod_base = OTHER; note = 2'-deoxy-2'-fluoroguanosine-3'-phosphate
  modified_base 8: mod_base = OTHER; note = 2'-O-methyluridine-3'-phosphate
  modified_base 9: mod_base = OTHER; note = 2'-deoxy-2'-fluorouridine-3'-phosphate
  modified_base 10: mod_base = OTHER; note = 2'-deoxy-2'-fluorocytidine-3'-phosphate
  modified_base 11: mod_base = OTHER; note = 2'-deoxy-2'-fluorouridine-3'-phosphate
  modified_base 12: mod_base = OTHER; note = 2'-O-methyluridine-3'-phosphate
  modified_base 13: mod_base = OTHER; note = 2'-deoxy-2'-fluoroguanosine-3'-phosphate
  modified_base 14: mod_base = OTHER; note = 2'-O-methylcytidine-3'-phosphate
  modified_base 15: mod_base = OTHER; note = 2'-deoxy-2'-fluorouridine-3'-phosphate
  modified_base 16: mod_base = OTHER; note = 2'-O-methylcytidine-3'-phosphate
  modified_base 17: mod_base = OTHER; note = 2'-deoxy-2'-fluorouridine-3'-phosphate
  modified_base 18: mod_base = OTHER; note = 2'-O-methyladenosine-3'-phosphate
  modified_base 19: mod_base = OTHER; note = 2'-deoxy-2'-fluorouridine-3'-phosphate
  modified_base 20: mod_base = OTHER; note = 2'-O-methyladenosine-3'-phosphate
  modified_base 21: mod_base = OTHER; note = 2'-deoxy-2'-fluoroadenosine-3'-phosphate ((2S,4R)-1-[29-[[2-(acetylamino)-2-deoxy-beta-D-galactopyra nosyl]oxy]-14,14-bis[[3-[[3-[[5-[[2-(acetylamino)-2-deoxy-b eta-D-galactopyranosyl]oxy]-1-oxopentyl]amino]propyl]amino] -3-oxopropoxy]methyl]-1,12,19,25-tetraoxo-16-oxa-13,20,24-t riazanonacos-1-yl]-4-hydroxy-2-pyrrolidinyl)methyl ester
aacagtgttcttgctctataa

SEQ ID NO: 228 - RNA, 23 nt, synthetic construct
  source 1..23: mol_type = other RNA
  modified_base 1: mod_base = OTHER; note = 2'-O-methyluridine-3'-phosphorothioate 5'-(E)-Vinylphosphonate
  modified_base 2: mod_base = OTHER; note = 2'-deoxy-2'-fluorouridine-3'-phosphorothioate
  modified_base 3: mod_base = OTHER; note = 2'-O-methyladenosine-3'-phosphate
  modified_base 4: mod_base = OTHER; note = 2'-deoxy-2'-fluorouridine-3'-phosphate
  modified_base 5: mod_base = OTHER; note = 2'-O-methyladenosine-3'-phosphate
  modified_base 6: mod_base = OTHER; note = 2'-deoxy-2'-fluoroguanosine-3'-phosphate
  modified_base 7: mod_base = OTHER; note = 2'-O-methyladenosine-3'-phosphate
  modified_base 8: mod_base = OTHER; note = 2'-deoxy-2'-fluoroguanosine-3'-phosphate
  modified_base 9: mod_base = OTHER; note = 2'-O-methylcytidine-3'-phosphate
  modified_base 10: mod_base = OTHER; note = 2'-deoxy-2'-fluoroadenosine-3'-phosphate
  modified_base 11: mod_base = OTHER; note = 2'-O-methyladenosine-3'-phosphate
  modified_base 12: mod_base = OTHER; note = 2'-O-methylguanosine-3'-phosphate
  modified_base 13: mod_base = OTHER; note = 2'-O-methyladenosine-3'-phosphate
  modified_base 14: mod_base = OTHER; note = 2'-deoxy-2'-fluoroadenosine-3'-phosphate
  modified_base 15: mod_base = OTHER; note = 2'-O-methylcytidine-3'-phosphate
  modified_base 16: mod_base = OTHER; note = 2'-deoxy-2'-fluoroadenosine-3'-phosphate
  modified_base 17: mod_base = OTHER; note = 2'-O-methylcytidine-3'-phosphate
  modified_base 18: mod_base = OTHER; note = 2'-deoxy-2'-fluorouridine-3'-phosphate
  modified_base 19: mod_base = OTHER; note = 2'-O-methylguanosine-3'-phosphate
  modified_base 20: mod_base = OTHER; note = 2'-deoxy-2'-fluorouridine-3'-phosphate
  modified_base 21: mod_base = OTHER; note = 2'-O-methyluridine-3'-phosphorothioate
  modified_base 22: mod_base = OTHER; note = 2'-O-methyluridine-3'-phosphorothioate
  modified_base 23: mod_base = OTHER; note = 2'-O-methyluridine
ttatagagcaagaacactgtttt

SEQ ID NO: 229 - RNA, 21 nt, synthetic construct
  source 1..21: mol_type = other RNA
  modified_base 1: mod_base = OTHER; note = 5'-deoxy-5'-(N-morpholinyl)-2'-O,4'-C-methylene adenosine-3'-phosphate
  modified_base 2: mod_base = OTHER; note = 2'-O-methyladenosine-3'-phosphorothioate
  modified_base 3: mod_base = OTHER; note = 2'-deoxy-2'-fluorocytidine-3'-phosphate
  modified_base 4: mod_base = OTHER; note = 2'-O-methyladenosine-3'-phosphate
  modified_base 5: mod_base = OTHER; note = 2'-deoxy-2'-fluoroguanosine-3'-phosphate
  modified_base 6: mod_base = OTHER; note = 2'-O-methyluridine-3'-phosphate
  modified_base 7: mod_base = OTHER; note = 2'-deoxy-2'-fluoroguanosine-3'-phosphate
  modified_base 8: mod_base = OTHER; note = 2'-O-methyluridine-3'-phosphate
  modified_base 9: mod_base = OTHER; note = 2'-deoxy-2'-fluorouridine-3'-phosphate
  modified_base 10: mod_base = OTHER; note = 2'-deoxy-2'-fluorocytidine-3'-phosphate
  modified_base 11: mod_base = OTHER; note = 2'-deoxy-2'-fluorouridine-3'-phosphate
  modified_base 12: mod_base = OTHER; note = 2'-O-methyluridine-3'-phosphate
  modified_base 13: mod_base = OTHER; note = 2'-deoxy-2'-fluoroguanosine-3'-phosphate
  modified_base 14: mod_base = OTHER; note = 2'-O-methylcytidine-3'-phosphate
  modified_base 15: mod_base = OTHER; note = 2'-deoxy-2'-fluorouridine-3'-phosphate
  modified_base 16: mod_base = OTHER; note = 2'-O-methylcytidine-3'-phosphate
  modified_base 17: mod_base = OTHER; note = 2'-deoxy-2'-fluorouridine-3'-phosphate
  modified_base 18: mod_base = OTHER; note = 2'-O-methyladenosine-3'-phosphate
  modified_base 19: mod_base = OTHER; note = 2'-deoxy-2'-fluorouridine-3'-phosphate
  modified_base 20: mod_base = OTHER; note = 2'-O-methyladenosine-3'-phosphate
  modified_base 21: mod_base = OTHER; note = 2'-deoxy-2'-fluoroadenosine-3'-phosphate ((2S,4R)-1-[29-[[2-(acetylamino)-2-deoxy-beta-D-galactopyra nosyl]oxy]-14,14-bis[[3-[[3-[[5-[[2-(acetylamino)-2-deoxy-b eta-D-galactopyranosyl]oxy]-1-oxopentyl]amino]propyl]amino] -3-oxopropoxy]methyl]-1,12,19,25-tetraoxo-16-oxa-13,20,24-t riazanonacos-1-yl]-4-hydroxy-2-pyrrolidinyl)methyl ester
aacagtgttcttgctctataa

SEQ ID NO: 230 - RNA, 23 nt, synthetic construct
  source 1..23: mol_type = other RNA
  modified_base 1: mod_base = OTHER; note = 2'-O-methyluridine-3'-phosphorothioate 5'-(E)-Vinylphosphonate
  modified_base 2: mod_base = OTHER; note = 2'-deoxy-2'-fluorouridine-3'-phosphorothioate
  modified_base 3: mod_base = OTHER; note = 2'-O-methyladenosine-3'-phosphate
  modified_base 4: mod_base = OTHER; note = 2'-deoxy-2'-fluorouridine-3'-phosphate
  modified_base 5: mod_base = OTHER; note = 2'-O-methyladenosine-3'-phosphate
  modified_base 6: mod_base = OTHER; note = 2'-deoxy-2'-fluoroguanosine-3'-phosphate
  modified_base 7: mod_base = OTHER; note = 2'-O-methyladenosine-3'-phosphate
  modified_base 8: mod_base = OTHER; note = 2'-deoxy-2'-fluoroguanosine-3'-phosphate
  modified_base 9: mod_base = OTHER; note = 2'-O-methylcytidine-3'-phosphate
  modified_base 10: mod_base = OTHER; note = 2'-deoxy-2'-fluoroadenosine-3'-phosphate
  modified_base 11: mod_base = OTHER; note = 2'-O-methyladenosine-3'-phosphate
  modified_base 12: mod_base = OTHER; note = 2'-O-methylguanosine-3'-phosphate
  modified_base 13: mod_base = OTHER; note = 2'-O-methyladenosine-3'-phosphate
  modified_base 14: mod_base = OTHER; note = 2'-deoxy-2'-fluoroadenosine-3'-phosphate
  modified_base 15: mod_base = OTHER; note = 2'-O-methylcytidine-3'-phosphate
  modified_base 16: mod_base = OTHER; note = 2'-deoxy-2'-fluoroadenosine-3'-phosphate
  modified_base 17: mod_base = OTHER; note = 2'-O-methylcytidine-3'-phosphate
  modified_base 18: mod_base = OTHER; note = 2'-deoxy-2'-fluorouridine-3'-phosphate
  modified_base 19: mod_base = OTHER; note = 2'-O-methylguanosine-3'-phosphate
  modified_base 20: mod_base = OTHER; note = 2'-deoxy-2'-fluorouridine-3'-phosphate
  modified_base 21: mod_base = OTHER; note = 2'-O-methyluridine-3'-phosphorothioate
  modified_base 22: mod_base = OTHER; note = 2'-O-methyluridine-3'-phosphorothioate
  modified_base 23: mod_base = OTHER; note = 2'-O-methyluridine
ttatagagcaagaacactgtttt

SEQ ID NO: 231 - RNA, 21 nt, synthetic construct
  source 1..21: mol_type = other RNA
  modified_base 1: mod_base = OTHER; note = 5'-deoxy-5'-(N-morpholinyl)-2'-O,4'-C-methylene adenosine-3'-phosphorothioate
  modified_base 2: mod_base = OTHER; note = 2'-O-methyladenosine-3'-phosphorothioate
  modified_base 3: mod_base = OTHER; note = 2'-deoxy-2'-fluorocytidine-3'-phosphate
  modified_base 4: mod_base = OTHER; note = 2'-O-methyladenosine-3'-phosphate
  modified_base 5: mod_base = OTHER; note = 2'-deoxy-2'-fluoroguanosine-3'-phosphate
  modified_base 6: mod_base = OTHER; note = 2'-O-methyluridine-3'-phosphate
  modified_base 7: mod_base = OTHER; note = 2'-deoxy-2'-fluoroguanosine-3'-phosphate
  modified_base 8: mod_base = OTHER; note = 2'-O-methyluridine-3'-phosphate
  modified_base 9: mod_base = OTHER; note = 2'-deoxy-2'-fluorouridine-3'-phosphate
  modified_base 10: mod_base = OTHER; note = 2'-deoxy-2'-fluorocytidine-3'-phosphate
  modified_base 11: mod_base = OTHER; note = 2'-deoxy-2'-fluorouridine-3'-phosphate
  modified_base 12: mod_base = OTHER; note = 2'-O-methyluridine-3'-phosphate
  modified_base 13: mod_base = OTHER; note = 2'-deoxy-2'-fluoroguanosine-3'-phosphate
  modified_base 14: mod_base = OTHER; note = 2'-O-methylcytidine-3'-phosphate
  modified_base 15: mod_base = OTHER; note = 2'-deoxy-2'-fluorouridine-3'-phosphate
  modified_base 16: mod_base = OTHER; note = 2'-O-methylcytidine-3'-phosphate
  modified_base 17: mod_base = OTHER; note = 2'-deoxy-2'-fluorouridine-3'-phosphate
  modified_base 18: mod_base = OTHER; note = 2'-O-methyladenosine-3'-phosphate
  modified_base 19: mod_base = OTHER; note = 2'-deoxy-2'-fluorouridine-3'-phosphate
  modified_base 20: mod_base = OTHER; note = 2'-O-methyladenosine-3'-phosphate
  modified_base 21: mod_base = OTHER; note = 2'-deoxy-2'-fluoroadenosine-3'-phosphate ((2S,4R)-1-[29-[[2-(acetylamino)-2-deoxy-beta-D-galactopyra nosyl]oxy]-14,14-bis[[3-[[3-[[5-[[2-(acetylamino)-2-deoxy-b eta-D-galactopyranosyl]oxy]-1-oxopentyl]amino]propyl]amino] -3-oxopropoxy]methyl]-1,12,19,25-tetraoxo-16-oxa-13,20,24-t riazanonacos-1-yl]-4-hydroxy-2-pyrrolidinyl)methyl ester
aacagtgttcttgctctataa

SEQ ID NO: 232 - RNA, 23 nt, synthetic construct
  source 1..23: mol_type = other RNA
  modified_base 1: mod_base = OTHER; note = 2'-O-methyluridine-3'-phosphorothioate 5'-(E)-Vinylphosphonate
  modified_base 2: mod_base = OTHER; note = 2'-deoxy-2'-fluorouridine-3'-phosphorothioate
  modified_base 3: mod_base = OTHER; note = 2'-O-methyladenosine-3'-phosphate
  modified_base 4: mod_base = OTHER; note = 2'-deoxy-2'-fluorouridine-3'-phosphate
  modified_base 5: mod_base = OTHER; note = 2'-O-methyladenosine-3'-phosphate
  modified_base 6: mod_base = OTHER; note = 2'-deoxy-2'-fluoroguanosine-3'-phosphate
  modified_base 7: mod_base = OTHER; note = 2'-O-methyladenosine-3'-phosphate
  modified_base 8: mod_base = OTHER; note = 2'-deoxy-2'-fluoroguanosine-3'-phosphate
  modified_base 9: mod_base = OTHER; note = 2'-O-methylcytidine-3'-phosphate
  modified_base 10: mod_base = OTHER; note = 2'-deoxy-2'-fluoroadenosine-3'-phosphate
  modified_base 11: mod_base = OTHER; note = 2'-O-methyladenosine-3'-phosphate
  modified_base 12: mod_base = OTHER; note = 2'-O-methylguanosine-3'-phosphate
  modified_base 13: mod_base = OTHER; note = 2'-O-methyladenosine-3'-phosphate
  modified_base 14: mod_base = OTHER; note = 2'-deoxy-2'-fluoroadenosine-3'-phosphate
  modified_base 15: mod_base = OTHER; note = 2'-O-methylcytidine-3'-phosphate
  modified_base 16: mod_base = OTHER; note = 2'-deoxy-2'-fluoroadenosine-3'-phosphate
  modified_base 17: mod_base = OTHER; note = 2'-O-methylcytidine-3'-phosphate
  modified_base 18: mod_base = OTHER; note = 2'-deoxy-2'-fluorouridine-3'-phosphate
  modified_base 19: mod_base = OTHER; note = 2'-O-methylguanosine-3'-phosphate
  modified_base 20: mod_base = OTHER; note = 2'-deoxy-2'-fluorouridine-3'-phosphate
  modified_base 21: mod_base = OTHER; note = 2'-O-methyluridine-3'-phosphorothioate
  modified_base 22: mod_base = OTHER; note = 2'-O-methyluridine-3'-phosphorothioate
  modified_base 23: mod_base = OTHER; note = 2'-O-methyluridine
ttatagagcaagaacactgtttt

SEQ ID NO: 233 - RNA, 21 nt, synthetic construct
  source 1..21: mol_type = other RNA
  modified_base 1: mod_base = OTHER; note = 5'-deoxy-5'-(N-morpholinyl)-2'-O,4'-C-methylene adenosine-3'-phosphorothioate
  modified_base 2: mod_base = OTHER; note = 2'-O-methyladenosine-3'-phosphorothioate
  modified_base 3: mod_base = OTHER; note = 2'-deoxy-2'-fluorocytidine-3'-phosphate
  modified_base 4: mod_base = OTHER; note = 2'-O-methyladenosine-3'-phosphate
  modified_base 5: mod_base = OTHER; note = 2'-deoxy-2'-fluoroguanosine-3'-phosphate
  modified_base 6: mod_base = OTHER; note = 2'-O-methyluridine-3'-phosphate
  modified_base 7: mod_base = OTHER; note = 2'-deoxy-2'-fluoroguanosine-3'-phosphate
  modified_base 8: mod_base = OTHER; note = 2'-O-methyluridine-3'-phosphate
  modified_base 9: mod_base = OTHER; note = 2'-deoxy-2'-fluorouridine-3'-phosphate
  modified_base 10: mod_base = OTHER; note = 2'-deoxy-2'-fluorocytidine-3'-phosphate
  modified_base 11: mod_base = OTHER; note = 2'-deoxy-2'-fluorouridine-3'-phosphate
  modified_base 12: mod_base = OTHER; note = 2'-O-methyluridine-3'-phosphate
  modified_base 13: mod_base = OTHER; note = 2'-deoxy-2'-fluoroguanosine-3'-phosphate
  modified_base 14: mod_base = OTHER; note = 2'-O-methylcytidine-3'-phosphate
  modified_base 15: mod_base = OTHER; note = 2'-deoxy-2'-fluorouridine-3'-phosphate
  modified_base 16: mod_base = OTHER; note = 2'-O-methylcytidine-3'-phosphate
  modified_base 17: mod_base = OTHER; note = 2'-deoxy-2'-fluorouridine-3'-phosphate
  modified_base 18: mod_base = OTHER; note = 2'-O-methyladenosine-3'-phosphate
  modified_base 19: mod_base = OTHER; note = 2'-deoxy-2'-fluorouridine-3'-phosphate
  modified_base 20: mod_base = OTHER; note = 2'-O-methyladenosine-3'-phosphate
  modified_base 21: mod_base = OTHER; note = 2'-deoxy-2'-fluoroadenosine-3'-phosphate ((2S,4R)-1-[29-[[2-(acetylamino)-2-deoxy-beta-D-galactopyra nosyl]oxy]-14,14-bis[[3-[[3-[[5-[[2-(acetylamino)-2-deoxy-b eta-D-galactopyranosyl]oxy]-1-oxopentyl]amino]propyl]amino] -3-oxopropoxy]methyl]-1,12,19,25-tetraoxo-16-oxa-13,20,24-t riazanonacos-1-yl]-4-hydroxy-2-pyrrolidinyl)methyl ester
aacagtgttcttgctctataa

SEQ ID NO: 234 - RNA, 23 nt, synthetic construct
  source 1..23: mol_type = other RNA
  modified_base 1: mod_base = OTHER; note = 2'-O-methyluridine-3'-phosphorothioate
  modified_base 2: mod_base = OTHER; note = 2'-deoxy-2'-fluorouridine-3'-phosphorothioate
  modified_base 3: mod_base = OTHER; note = 2'-O-methyladenosine-3'-phosphate
  modified_base 4: mod_base = OTHER; note = 2'-deoxy-2'-fluorouridine-3'-phosphate
  modified_base 5: mod_base = OTHER; note = 2'-O-methyladenosine-3'-phosphate
  modified_base 6: mod_base = OTHER; note = 2'-deoxy-2'-fluoroguanosine-3'-phosphate
  modified_base 7: mod_base = OTHER; note = 2'-O-methyladenosine-3'-phosphate
  modified_base 8: mod_base = OTHER; note = 2'-deoxy-2'-fluoroguanosine-3'-phosphate
  modified_base 9: mod_base = OTHER; note = 2'-O-methylcytidine-3'-phosphate
  modified_base 10: mod_base = OTHER; note = 2'-deoxy-2'-fluoroadenosine-3'-phosphate
  modified_base 11: mod_base = OTHER; note = 2'-O-methyladenosine-3'-phosphate
  modified_base 12: mod_base = OTHER; note = 2'-O-methylguanosine-3'-phosphate
  modified_base 13: mod_base = OTHER; note = 2'-O-methyladenosine-3'-phosphate
  modified_base 14: mod_base = OTHER; note = 2'-deoxy-2'-fluoroadenosine-3'-phosphate
  modified_base 15: mod_base = OTHER; note = 2'-O-methylcytidine-3'-phosphate
  modified_base 16: mod_base = OTHER; note = 2'-deoxy-2'-fluoroadenosine-3'-phosphate
  modified_base 17: mod_base = OTHER; note = 2'-O-methylcytidine-3'-phosphate
  modified_base 18: mod_base = OTHER; note = 2'-deoxy-2'-fluorouridine-3'-phosphate
  modified_base 19: mod_base = OTHER; note = 2'-O-methylguanosine-3'-phosphate
  modified_base 20: mod_base = OTHER; note = 2'-deoxy-2'-fluorouridine-3'-phosphate
  modified_base 21: mod_base = OTHER; note = 2'-O-methyluridine-3'-phosphorothioate
  modified_base 22: mod_base = OTHER; note = 2'-O-methyluridine-3'-phosphorothioate
  modified_base 23: mod_base = OTHER; note = 2'-O-methyluridine
ttatagagcaagaacactgtttt

SEQ ID NO: 235 - RNA, 21 nt, synthetic construct
  source 1..21: mol_type = other RNA
  modified_base 1: mod_base = OTHER; note = 5'-deoxy-5'-(N-morpholinyl)-2'-O,4'-C-methylene adenosine-3'-phosphorothioate
  modified_base 2: mod_base = OTHER; note = 2'-O-methyladenosine-3'-phosphate
  modified_base 3: mod_base = OTHER; note = 2'-deoxy-2'-fluorocytidine-3'-phosphate
  modified_base 4: mod_base = OTHER; note = 2'-O-methyladenosine-3'-phosphate
  modified_base 5: mod_base = OTHER; note = 2'-deoxy-2'-fluoroguanosine-3'-phosphate
  modified_base 6: mod_base = OTHER; note = 2'-O-methyluridine-3'-phosphate
  modified_base 7: mod_base = OTHER; note = 2'-deoxy-2'-fluoroguanosine-3'-phosphate
  modified_base 8: mod_base = OTHER; note = 2'-O-methyluridine-3'-phosphate
  modified_base 9: mod_base = OTHER; note = 2'-deoxy-2'-fluorouridine-3'-phosphate
  modified_base 10: mod_base = OTHER; note = 2'-deoxy-2'-fluorocytidine-3'-phosphate
  modified_base 11: mod_base = OTHER; note = 2'-deoxy-2'-fluorouridine-3'-phosphate
  modified_base 12: mod_base = OTHER; note = 2'-O-methyluridine-3'-phosphate
  modified_base 13: mod_base = OTHER; note = 2'-deoxy-2'-fluoroguanosine-3'-phosphate
  modified_base 14: mod_base = OTHER; note = 2'-O-methylcytidine-3'-phosphate
  modified_base 15: mod_base = OTHER; note = 2'-deoxy-2'-fluorouridine-3'-phosphate
  modified_base 16: mod_base = OTHER; note = 2'-O-methylcytidine-3'-phosphate
  modified_base 17: mod_base = OTHER; note = 2'-deoxy-2'-fluorouridine-3'-phosphate
  modified_base 18: mod_base = OTHER; note = 2'-O-methyladenosine-3'-phosphate
  modified_base 19: mod_base = OTHER; note = 2'-deoxy-2'-fluorouridine-3'-phosphate
  modified_base 20: mod_base = OTHER; note = 2'-O-methyladenosine-3'-phosphate
  modified_base 21: mod_base = OTHER; note = 2'-deoxy-2'-fluoroadenosine-3'-phosphate ((2S,4R)-1-[29-[[2-(acetylamino)-2-deoxy-beta-D-galactopyra nosyl]oxy]-14,14-bis[[3-[[3-[[5-[[2-(acetylamino)-2-deoxy-b eta-D-galactopyranosyl]oxy]-1-oxopentyl]amino]propyl]amino] -3-oxopropoxy]methyl]-1,12,19,25-tetraoxo-16-oxa-13,20,24-t riazanonacos-1-yl]-4-hydroxy-2-pyrrolidinyl)methyl ester
aacagtgttcttgctctataa

SEQ ID NO: 236 - RNA, 23 nt, synthetic construct
  source 1..23: mol_type = other RNA
  modified_base 1: mod_base = OTHER; note = 2'-O-methyluridine-3'-phosphorothioate 5'-(E)-Vinylphosphonate
  modified_base 2: mod_base = OTHER; note = 2'-deoxy-2'-fluorouridine-3'-phosphorothioate
  modified_base 3: mod_base = OTHER; note = 2'-O-methyladenosine-3'-phosphate
  modified_base 4: mod_base = OTHER; note = 2'-deoxy-2'-fluorouridine-3'-phosphate
  modified_base 5: mod_base = OTHER; note = 2'-O-methyladenosine-3'-phosphate
  modified_base 6: mod_base = OTHER; note = 2'-deoxy-2'-fluoroguanosine-3'-phosphate
  modified_base 7: mod_base = OTHER; note = 2'-O-methyladenosine-3'-phosphate
  modified_base 8: mod_base = OTHER; note = 2'-deoxy-2'-fluoroguanosine-3'-phosphate
  modified_base 9: mod_base = OTHER; note = 2'-O-methylcytidine-3'-phosphate
  modified_base 10: mod_base = OTHER; note = 2'-deoxy-2'-fluoroadenosine-3'-phosphate
  modified_base 11: mod_base = OTHER; note = 2'-O-methyladenosine-3'-phosphate
  modified_base 12: mod_base = OTHER; note = 2'-O-methylguanosine-3'-phosphate
  modified_base 13: mod_base = OTHER; note = 2'-O-methyladenosine-3'-phosphate
  modified_base 14: mod_base = OTHER; note = 2'-deoxy-2'-fluoroadenosine-3'-phosphate
  modified_base 15: mod_base = OTHER; note = 2'-O-methylcytidine-3'-phosphate
  modified_base 16: mod_base = OTHER; note = 2'-deoxy-2'-fluoroadenosine-3'-phosphate
  modified_base 17: mod_base = OTHER; note = 2'-O-methylcytidine-3'-phosphate
  modified_base 18: mod_base = OTHER; note = 2'-deoxy-2'-fluorouridine-3'-phosphate
  modified_base 19: mod_base = OTHER; note = 2'-O-methylguanosine-3'-phosphate
  modified_base 20: mod_base = OTHER; note = 2'-deoxy-2'-fluorouridine-3'-phosphate
  modified_base 21: mod_base = OTHER; note = 2'-O-methyluridine-3'-phosphorothioate
  modified_base 22: mod_base = OTHER; note = 2'-O-methyluridine-3'-phosphorothioate
  modified_base 23: mod_base = OTHER; note = 2'-O-methyluridine
ttatagagcaagaacactgtttt

SEQ ID NO: 237 - RNA, 21 nt, synthetic construct
  source 1..21: mol_type = other RNA
  modified_base 1: mod_base = OTHER; note = 2'-deoxy-2'-fluorouridine-3'-phosphorothioate
  modified_base 2: mod_base = OTHER; note = 2'-O-methylguanosine-3'-phosphorothioate
  modified_base 3: mod_base = OTHER; note = 2'-deoxy-2'-fluoroguanosine-3'-phosphate
  modified_base 4: mod_base = OTHER; note = 2'-O-methyladenosine-3'-phosphate
  modified_base 5: mod_base = OTHER; note = 2'-deoxy-2'-fluoroadenosine-3'-phosphate
  modified_base 6: mod_base = OTHER; note = 2'-O-methylguanosine-3'-phosphate
  modified_base 7: mod_base = OTHER; note = 2'-deoxy-2'-fluorocytidine-3'-phosphate
  modified_base 8: mod_base = OTHER; note = 2'-O-methyladenosine-3'-phosphate
  modified_base 9: mod_base = OTHER; note = 2'-deoxy-2'-fluoroguanosine-3'-phosphate
  modified_base 10: mod_base = OTHER; note = 2'-deoxy-2'-fluorouridine-3'-phosphate
  modified_base 11: mod_base = OTHER; note = 2'-deoxy-2'-fluoroadenosine-3'-phosphate
  modified_base 12: mod_base = OTHER; note = 2'-O-methyluridine-3'-phosphate
  modified_base 13: mod_base = OTHER; note = 2'-deoxy-2'-fluoroguanosine-3'-phosphate
  modified_base 14: mod_base = OTHER; note = 2'-O-methyluridine-3'-phosphate
  modified_base 15: mod_base = OTHER; note = 2'-deoxy-2'-fluorouridine-3'-phosphate
  modified_base 16: mod_base = OTHER; note = 2'-O-methylguanosine-3'-phosphate
  modified_base 17: mod_base = OTHER; note = 2'-deoxy-2'-fluoroadenosine-3'-phosphate
  modified_base 18: mod_base = OTHER; note = 2'-O-methyluridine-3'-phosphate
  modified_base 19: mod_base = OTHER; note = 2'-deoxy-2'-fluoroguanosine-3'-phosphate
  modified_base 20: mod_base = OTHER; note = 2'-O-methylguanosine-3'-phosphate
  modified_base 21: mod_base = OTHER; note = 2'-deoxy-2'-fluoroadenosine-3'-phosphate ((2S,4R)-1-[29-[[2-(acetylamino)-2-deoxy-beta-D-galactopyra nosyl]oxy]-14,14-bis[[3-[[3-[[5-[[2-(acetylamino)-2-deoxy-b eta-D-galactopyranosyl]oxy]-1-oxopentyl]amino]propyl]amino] -3-oxopropoxy]methyl]-1,12,19,25-tetraoxo-16-oxa-13,20,24-t riazanonacos-1-yl]-4-hydroxy-2-pyrrolidinyl)methyl ester
tggaagcagtatgttgatgga

SEQ ID NO: 238 - RNA, 23 nt, synthetic construct
  source 1..23: mol_type = other RNA
  modified_base 1: mod_base = OTHER; note = 2'-O-methyluridine-3'-phosphorothioate
  modified_base 2: mod_base = OTHER; note = 2'-deoxy-2'-fluorocytidine-3'-phosphorothioate
  modified_base 3: mod_base = OTHER; note = 2'-O-methylcytidine-3'-phosphate
  modified_base 4: mod_base = OTHER; note = 2'-deoxy-2'-fluoroadenosine-3'-phosphate
  modified_base 5: mod_base = OTHER; note = 2'-O-methyluridine-3'-phosphate
  modified_base 6: mod_base = OTHER; note = 2'-deoxy-2'-fluorocytidine-3'-phosphate
  modified_base 7: mod_base = OTHER; note = 2'-O-methyladenosine-3'-phosphate
  modified_base 8: mod_base = OTHER; note = 2'-deoxy-2'-fluoroadenosine-3'-phosphate
  modified_base 9: mod_base = OTHER; note = 2'-O-methylcytidine-3'-phosphate
  modified_base 10: mod_base = OTHER; note = 2'-deoxy-2'-fluoroadenosine-3'-phosphate
  modified_base 11: mod_base = OTHER; note = 2'-O-methyluridine-3'-phosphate
  modified_base 12: mod_base = OTHER; note = 2'-O-methyladenosine-3'-phosphate
  modified_base 13: mod_base = OTHER; note = 2'-O-methylcytidine-3'-phosphate
  modified_base 14: mod_base = OTHER; note = 2'-deoxy-2'-fluorouridine-3'-phosphate
  modified_base 15: mod_base = OTHER; note = 2'-O-methylguanosine-3'-phosphate
  modified_base 16: mod_base = OTHER; note = 2'-deoxy-2'-fluorocytidine-3'-phosphate
  modified_base 17: mod_base = OTHER; note = 2'-O-methyluridine-3'-phosphate
  modified_base 18: mod_base = OTHER; note = 2'-deoxy-2'-fluorouridine-3'-phosphate
  modified_base 19: mod_base = OTHER; note = 2'-O-methylcytidine-3'-phosphate
  modified_base 20: mod_base = OTHER; note = 2'-deoxy-2'-fluorocytidine-3'-phosphate
  modified_base 21: mod_base = OTHER; note = 2'-O-methyladenosine-3'-phosphorothioate
  modified_base 22: mod_base = OTHER; note = 2'-O-methyladenosine-3'-phosphorothioate
  modified_base 23: mod_base = OTHER; note = 2'-O-methyladenosine
tccatcaacatactgcttccaaa

SEQ ID NO: 239 - RNA, 21 nt, synthetic construct
  source 1..21: mol_type = other RNA
  modified_base 1: mod_base = OTHER; note = 2'-deoxy-2'-fluorouridine-3'-phosphorothioate
  modified_base 2: mod_base = OTHER; note = 2'-O-methylguanosine-3'-phosphorothioate
  modified_base 3: mod_base = OTHER; note = 2'-deoxy-2'-fluoroguanosine-3'-phosphate
  modified_base 4: mod_base = OTHER; note = 2'-O-methyladenosine-3'-phosphate
  modified_base 5: mod_base = OTHER; note = 2'-deoxy-2'-fluoroadenosine-3'-phosphate
  modified_base 6: mod_base = OTHER; note = 2'-O-methylguanosine-3'-phosphate
  modified_base 7: mod_base = OTHER; note = 2'-deoxy-2'-fluorocytidine-3'-phosphate
  modified_base 8: mod_base = OTHER; note = 2'-O-methyladenosine-3'-phosphate
  modified_base 9: mod_base = OTHER; note = 2'-deoxy-2'-fluoroguanosine-3'-phosphate
  modified_base 10: mod_base = OTHER; note = 2'-deoxy-2'-fluorouridine-3'-phosphate
  modified_base 11: mod_base = OTHER; note = 2'-deoxy-2'-fluoroadenosine-3'-phosphate
  modified_base 12: mod_base = OTHER; note = 2'-O-methyluridine-3'-phosphate
  modified_base 13: mod_base = OTHER; note = 2'-deoxy-2'-fluoroguanosine-3'-phosphate
  modified_base 14: mod_base = OTHER; note = 2'-O-methyluridine-3'-phosphate
  modified_base 15: mod_base = OTHER; note = 2'-deoxy-2'-fluorouridine-3'-phosphate
  modified_base 16: mod_base = OTHER; note = 2'-O-methylguanosine-3'-phosphate
  modified_base 17: mod_base = OTHER; note = 2'-deoxy-2'-fluoroadenosine-3'-phosphate
  modified_base 18: mod_base = OTHER; note = 2'-O-methyluridine-3'-phosphate
  modified_base 19: mod_base = OTHER; note = 2'-deoxy-2'-fluoroguanosine-3'-phosphate
  modified_base 20: mod_base = OTHER; note = 2'-O-methylguanosine-3'-phosphate
  modified_base 21: mod_base = OTHER; note = 2'-deoxy-2'-fluoroadenosine-3'-phosphate ((2S,4R)-1-[29-[[2-(acetylamino)-2-deoxy-beta-D-galactopyra nosyl]oxy]-14,14-bis[[3-[[3-[[5-[[2-(acetylamino)-2-deoxy-b eta-D-galactopyranosyl]oxy]-1-oxopentyl]amino]propyl]amino] -3-oxopropoxy]methyl]-1,12,19,25-tetraoxo-16-oxa-13,20,24-t riazanonacos-1-yl]-4-hydroxy-2-pyrrolidinyl)methyl ester
tggaagcagtatgttgatgga

SEQ ID NO: 240 - RNA, 23 nt, synthetic construct
  source 1..23: mol_type = other RNA
  modified_base 1: mod_base = OTHER; note = 2'-O-methyluridine-3'-phosphorothioate 5'-(E)-Vinylphosphonate
  modified_base 2: mod_base = OTHER; note = 2'-deoxy-2'-fluorocytidine-3'-phosphorothioate
  modified_base 3: mod_base = OTHER; note = 2'-O-methylcytidine-3'-phosphate
  modified_base 4: mod_base = OTHER; note = 2'-deoxy-2'-fluoroadenosine-3'-phosphate
  modified_base 5: mod_base = OTHER; note = 2'-O-methyluridine-3'-phosphate
  modified_base 6: mod_base = OTHER; note = 2'-deoxy-2'-fluorocytidine-3'-phosphate
  modified_base 7: mod_base = OTHER; note = 2'-O-methyladenosine-3'-phosphate
  modified_base 8: mod_base = OTHER; note = 2'-deoxy-2'-fluoroadenosine-3'-phosphate
  modified_base 9: mod_base = OTHER; note = 2'-O-methylcytidine-3'-phosphate
  modified_base 10: mod_base = OTHER; note = 2'-deoxy-2'-fluoroadenosine-3'-phosphate
  modified_base 11: mod_base = OTHER; note = 2'-O-methyluridine-3'-phosphate
  modified_base 12: mod_base = OTHER; note = 2'-O-methyladenosine-3'-phosphate
  modified_base 13: mod_base = OTHER; note = 2'-O-methylcytidine-3'-phosphate
  modified_base 14: mod_base = OTHER; note = 2'-deoxy-2'-fluorouridine-3'-phosphate
  modified_base 15: mod_base = OTHER; note = 2'-O-methylguanosine-3'-phosphate
  modified_base 16: mod_base = OTHER; note = 2'-deoxy-2'-fluorocytidine-3'-phosphate
  modified_base 17: mod_base = OTHER; note = 2'-O-methyluridine-3'-phosphate
  modified_base 18: mod_base = OTHER; note = 2'-deoxy-2'-fluorouridine-3'-phosphate
  modified_base 19: mod_base = OTHER; note = 2'-O-methylcytidine-3'-phosphate
  modified_base 20: mod_base = OTHER; note = 2'-deoxy-2'-fluorocytidine-3'-phosphate
  modified_base 21: mod_base = OTHER; note = 2'-O-methyladenosine-3'-phosphorothioate
  modified_base 22: mod_base = OTHER; note = 2'-O-methyladenosine-3'-phosphorothioate
  modified_base 23: mod_base = OTHER; note = 2'-O-methyladenosine
tccatcaacatactgcttccaaa

SEQ ID NO: 241 - RNA, 21 nt, synthetic construct
  source 1..21: mol_type = other RNA
  modified_base 1: mod_base = OTHER; note = 5'-deoxy-5'-(N-morpholinyl)-2'-O,4'-C-methylene uridine-3'-phosphate
  modified_base 2: mod_base = OTHER; note = 2'-O-methylguanosine-3'-phosphate
  modified_base 3: mod_base = OTHER; note = 2'-deoxy-2'-fluoroguanosine-3'-phosphate
  modified_base 4: mod_base = OTHER; note = 2'-O-methyladenosine-3'-phosphate
  modified_base 5: mod_base = OTHER; note = 2'-deoxy-2'-fluoroadenosine-3'-phosphate
  modified_base 6: mod_base = OTHER; note = 2'-O-methylguanosine-3'-phosphate
  modified_base 7: mod_base = OTHER; note = 2'-deoxy-2'-fluorocytidine-3'-phosphate
  modified_base 8: mod_base = OTHER; note = 2'-O-methyladenosine-3'-phosphate
  modified_base 9: mod_base = OTHER; note = 2'-deoxy-2'-fluoroguanosine-3'-phosphate
  modified_base 10: mod_base = OTHER; note = 2'-deoxy-2'-fluorouridine-3'-phosphate
  modified_base 11: mod_base = OTHER; note = 2'-deoxy-2'-fluoroadenosine-3'-phosphate
  modified_base 12: mod_base = OTHER; note = 2'-O-methyluridine-3'-phosphate
  modified_base 13: mod_base = OTHER; note = 2'-deoxy-2'-fluoroguanosine-3'-phosphate
  modified_base 14: mod_base = OTHER; note = 2'-O-methyluridine-3'-phosphate
  modified_base 15: mod_base = OTHER; note = 2'-deoxy-2'-fluorouridine-3'-phosphate
  modified_base 16: mod_base = OTHER; note = 2'-O-methylguanosine-3'-phosphate
  modified_base 17: mod_base = OTHER; note = 2'-deoxy-2'-fluoroadenosine-3'-phosphate
  modified_base 18: mod_base = OTHER; note = 2'-O-methyluridine-3'-phosphate
  modified_base 19: mod_base = OTHER; note = 2'-deoxy-2'-fluoroguanosine-3'-phosphate
  modified_base 20: mod_base = OTHER; note = 2'-O-methylguanosine-3'-phosphate
  modified_base 21: mod_base = OTHER; note = 2'-deoxy-2'-fluoroadenosine-3'-phosphate ((2S,4R)-1-[29-[[2-(acetylamino)-2-deoxy-beta-D-galactopyra nosyl]oxy]-14,14-bis[[3-[[3-[[5-[[2-(acetylamino)-2-deoxy-b eta-D-galactopyranosyl]oxy]-1-oxopentyl]amino]propyl]amino] -3-oxopropoxy]methyl]-1,12,19,25-tetraoxo-16-oxa-13,20,24-t riazanonacos-1-yl]-4-hydroxy-2-pyrrolidinyl)methyl ester
tggaagcagtatgttgatgga

SEQ ID NO: 242 - RNA, 23 nt, synthetic construct
  source 1..23: mol_type = other RNA
  modified_base 1: mod_base = OTHER; note = 2'-O-methyluridine-3'-phosphorothioate 5'-(E)-Vinylphosphonate
  modified_base 2: mod_base = OTHER; note = 2'-deoxy-2'-fluorocytidine-3'-phosphorothioate
  modified_base 3: mod_base = OTHER; note = 2'-O-methylcytidine-3'-phosphate
  modified_base 4: mod_base = OTHER; note = 2'-deoxy-2'-fluoroadenosine-3'-phosphate
  modified_base 5: mod_base = OTHER; note = 2'-O-methyluridine-3'-phosphate
  modified_base 6: mod_base = OTHER; note = 2'-deoxy-2'-fluorocytidine-3'-phosphate
  modified_base 7: mod_base = OTHER; note = 2'-O-methyladenosine-3'-phosphate
  modified_base 8: mod_base = OTHER; note = 2'-deoxy-2'-fluoroadenosine-3'-phosphate
  modified_base 9: mod_base = OTHER; note = 2'-O-methylcytidine-3'-phosphate
  modified_base 10: mod_base = OTHER; note = 2'-deoxy-2'-fluoroadenosine-3'-phosphate
  modified_base 11: mod_base = OTHER; note = 2'-O-methyluridine-3'-phosphate
  modified_base 12: mod_base = OTHER; note = 2'-O-methyladenosine-3'-phosphate
  modified_base 13: mod_base = OTHER; note = 2'-O-methylcytidine-3'-phosphate
  modified_base 14: mod_base = OTHER; note = 2'-deoxy-2'-fluorouridine-3'-phosphate
  modified_base 15: mod_base = OTHER; note = 2'-O-methylguanosine-3'-phosphate
  modified_base 16: mod_base = OTHER; note = 2'-deoxy-2'-fluorocytidine-3'-phosphate
  modified_base 17: mod_base = OTHER; note = 2'-O-methyluridine-3'-phosphate
  modified_base 18: mod_base = OTHER; note = 2'-deoxy-2'-fluorouridine-3'-phosphate
  modified_base 19: mod_base = OTHER; note = 2'-O-methylcytidine-3'-phosphate
  modified_base 20: mod_base = OTHER; note = 2'-deoxy-2'-fluorocytidine-3'-phosphate
  modified_base 21: mod_base = OTHER; note = 2'-O-methyladenosine-3'-phosphorothioate
  modified_base 22: mod_base = OTHER; note = 2'-O-methyladenosine-3'-phosphorothioate
  modified_base 23: mod_base = OTHER; note = 2'-O-methyladenosine
tccatcaacatactgcttccaaa

SEQ ID NO: 243 - RNA, 21 nt, synthetic construct
  source 1..21: mol_type = other RNA
  modified_base 1: mod_base = OTHER; note = 5'-deoxy-5'-(N-morpholinyl)-2'-O,4'-C-methylene uridine-3'-phosphate
  modified_base 2: mod_base = OTHER; note = 2'-O-methylguanosine-3'-phosphorothioate
  modified_base 3: mod_base = OTHER; note = 2'-deoxy-2'-fluoroguanosine-3'-phosphate
  modified_base 4: mod_base = OTHER; note = 2'-O-methyladenosine-3'-phosphate
  modified_base 5: mod_base = OTHER; note = 2'-deoxy-2'-fluoroadenosine-3'-phosphate
  modified_base 6: mod_base = OTHER; note = 2'-O-methylguanosine-3'-phosphate
  modified_base 7: mod_base = OTHER; note = 2'-deoxy-2'-fluorocytidine-3'-phosphate
  modified_base 8: mod_base = OTHER; note = 2'-O-methyladenosine-3'-phosphate
  modified_base 9: mod_base = OTHER; note = 2'-deoxy-2'-fluoroguanosine-3'-phosphate
  modified_base 10: mod_base = OTHER; note = 2'-deoxy-2'-fluorouridine-3'-phosphate
  modified_base 11: mod_base = OTHER; note = 2'-deoxy-2'-fluoroadenosine-3'-phosphate
  modified_base 12: mod_base = OTHER; note = 2'-O-methyluridine-3'-phosphate
  modified_base 13: mod_base = OTHER; note = 2'-deoxy-2'-fluoroguanosine-3'-phosphate
  modified_base 14: mod_base = OTHER; note = 2'-O-methyluridine-3'-phosphate
  modified_base 15: mod_base = OTHER; note = 2'-deoxy-2'-fluorouridine-3'-phosphate
  modified_base 16: mod_base = OTHER; note = 2'-O-methylguanosine-3'-phosphate
  modified_base 17: mod_base = OTHER; note = 2'-deoxy-2'-fluoroadenosine-3'-phosphate
  modified_base 18: mod_base = OTHER; note = 2'-O-methyluridine-3'-phosphate
  modified_base 19: mod_base = OTHER; note = 2'-deoxy-2'-fluoroguanosine-3'-phosphate
  modified_base 20: mod_base = OTHER; note = 2'-O-methylguanosine-3'-phosphate
  modified_base 21: mod_base = OTHER; note = 2'-deoxy-2'-fluoroadenosine-3'-phosphate ((2S,4R)-1-[29-[[2-(acetylamino)-2-deoxy-beta-D-galactopyra nosyl]oxy]-14,14-bis[[3-[[3-[[5-[[2-(acetylamino)-2-deoxy-b eta-D-galactopyranosyl]oxy]-1-oxopentyl]amino]propyl]amino] -3-oxopropoxy]methyl]-1,12,19,25-tetraoxo-16-oxa-13,20,24-t riazanonacos-1-yl]-4-hydroxy-2-pyrrolidinyl)methyl ester
tggaagcagtatgttgatgga

SEQ ID NO: 244 - RNA, 23 nt, synthetic construct
  source 1..23: mol_type = other RNA
  modified_base 1: mod_base = OTHER; note = 2'-O-methyluridine-3'-phosphorothioate 5'-(E)-Vinylphosphonate
  modified_base 2: mod_base = OTHER; note = 2'-deoxy-2'-fluorocytidine-3'-phosphorothioate
  modified_base 3: mod_base = OTHER; note = 2'-O-methylcytidine-3'-phosphate
  modified_base 4: mod_base = OTHER; note = 2'-deoxy-2'-fluoroadenosine-3'-phosphate
  modified_base 5: mod_base = OTHER; note = 2'-O-methyluridine-3'-phosphate
  modified_base 6: mod_base = OTHER; note = 2'-deoxy-2'-fluorocytidine-3'-phosphate
  modified_base 7: mod_base = OTHER; note = 2'-O-methyladenosine-3'-phosphate
  modified_base 8: mod_base = OTHER; note = 2'-deoxy-2'-fluoroadenosine-3'-phosphate
  modified_base 9: mod_base = OTHER; note = 2'-O-methylcytidine-3'-phosphate
  modified_base 10: mod_base = OTHER; note = 2'-deoxy-2'-fluoroadenosine-3'-phosphate
  modified_base 11: mod_base = OTHER; note = 2'-O-methyluridine-3'-phosphate
  modified_base 12: mod_base = OTHER; note = 2'-O-methyladenosine-3'-phosphate
  modified_base 13: mod_base = OTHER; note = 2'-O-methylcytidine-3'-phosphate
  modified_base 14: mod_base = OTHER; note = 2'-deoxy-2'-fluorouridine-3'-phosphate
  modified_base 15: mod_base = OTHER; note = 2'-O-methylguanosine-3'-phosphate
  modified_base 16: mod_base = OTHER; note = 2'-deoxy-2'-fluorocytidine-3'-phosphate
  modified_base 17: mod_base = OTHER; note = 2'-O-methyluridine-3'-phosphate
  modified_base 18: mod_base = OTHER; note = 2'-deoxy-2'-fluorouridine-3'-phosphate
  modified_base 19: mod_base = OTHER; note = 2'-O-methylcytidine-3'-phosphate
  modified_base 20: mod_base = OTHER; note = 2'-deoxy-2'-fluorocytidine-3'-phosphate
  modified_base 21: mod_base = OTHER; note = 2'-O-methyladenosine-3'-phosphorothioate
  modified_base 22: mod_base = OTHER; note = 2'-O-methyladenosine-3'-phosphorothioate
  modified_base 23: mod_base = OTHER; note = 2'-O-methyladenosine
tccatcaacatactgcttccaaa

SEQ ID NO: 245 - RNA, 21 nt, synthetic construct
  source 1..21: mol_type = other RNA
  modified_base 1: mod_base = OTHER; note = 5'-deoxy-5'-(N-morpholinyl)-2'-O,4'-C-methylene uridine-3'-phosphorothioate
  modified_base 2: mod_base = OTHER; note = 2'-O-methylguanosine-3'-phosphorothioate
  modified_base 3: mod_base = OTHER; note = 2'-deoxy-2'-fluoroguanosine-3'-phosphate
  modified_base 4: mod_base = OTHER; note = 2'-O-methyladenosine-3'-phosphate
  modified_base 5: mod_base = OTHER; note = 2'-deoxy-2'-fluoroadenosine-3'-phosphate
  modified_base 6: mod_base = OTHER; note = 2'-O-methylguanosine-3'-phosphate
  modified_base 7: mod_base = OTHER; note = 2'-deoxy-2'-fluorocytidine-3'-phosphate
  modified_base 8: mod_base = OTHER; note = 2'-O-methyladenosine-3'-phosphate
  modified_base 9: mod_base = OTHER; note = 2'-deoxy-2'-fluoroguanosine-3'-phosphate
  modified_base 10: mod_base = OTHER; note = 2'-deoxy-2'-fluorouridine-3'-phosphate
  modified_base 11: mod_base = OTHER; note = 2'-deoxy-2'-fluoroadenosine-3'-phosphate
  modified_base 12: mod_base = OTHER; note = 2'-O-methyluridine-3'-phosphate
  modified_base 13: mod_base = OTHER; note = 2'-deoxy-2'-fluoroguanosine-3'-phosphate
  modified_base 14: mod_base = OTHER; note = 2'-O-methyluridine-3'-phosphate
  modified_base 15: mod_base = OTHER; note = 2'-deoxy-2'-fluorouridine-3'-phosphate
  modified_base 16: mod_base = OTHER; note = 2'-O-methylguanosine-3'-phosphate
  modified_base 17: mod_base = OTHER; note = 2'-deoxy-2'-fluoroadenosine-3'-phosphate
  modified_base 18: mod_base = OTHER; note = 2'-O-methyluridine-3'-phosphate
  modified_base 19: mod_base = OTHER; note = 2'-deoxy-2'-fluoroguanosine-3'-phosphate
  modified_base 20: mod_base = OTHER; note = 2'-O-methylguanosine-3'-phosphate
  modified_base 21: mod_base = OTHER; note = 2'-deoxy-2'-fluoroadenosine-3'-phosphate ((2S,4R)-1-[29-[[2-(acetylamino)-2-deoxy-beta-D-galactopyra nosyl]oxy]-14,14-bis[[3-[[3-[[5-[[2-(acetylamino)-2-deoxy-b eta-D-galactopyranosyl]oxy]-1-oxopentyl]amino]propyl]amino] -3-oxopropoxy]methyl]-1,12,19,25-tetraoxo-16-oxa-13,20,24-t riazanonacos-1-yl]-4-hydroxy-2-pyrrolidinyl)methyl ester
tggaagcagtatgttgatgga

SEQ ID NO: 246 - RNA, 23 nt, synthetic construct
  source 1..23: mol_type = other RNA
  modified_base 1: mod_base = OTHER; note = 2'-O-methyluridine-3'-phosphorothioate
  modified_base 2: mod_base = OTHER; note = 2'-deoxy-2'-fluorocytidine-3'-phosphorothioate
  modified_base 3: mod_base = OTHER; note = 2'-O-methylcytidine-3'-phosphate
  modified_base 4: mod_base = OTHER; note = 2'-deoxy-2'-fluoroadenosine-3'-phosphate
  modified_base 5: mod_base = OTHER; note = 2'-O-methyluridine-3'-phosphate
  modified_base 6: mod_base = OTHER; note = 2'-deoxy-2'-fluorocytidine-3'-phosphate
  modified_base 7: mod_base = OTHER; note = 2'-O-methyladenosine-3'-phosphate
  modified_base 8: mod_base = OTHER; note = 2'-deoxy-2'-fluoroadenosine-3'-phosphate
  modified_base 9: mod_base = OTHER; note = 2'-O-methylcytidine-3'-phosphate
  modified_base 10: mod_base = OTHER; note = 2'-deoxy-2'-fluoroadenosine-3'-phosphate
  modified_base 11: mod_base = OTHER; note = 2'-O-methyluridine-3'-phosphate
  modified_base 12: mod_base = OTHER; note = 2'-O-methyladenosine-3'-phosphate
  modified_base 13: mod_base = OTHER; note = 2'-O-methylcytidine-3'-phosphate
  modified_base 14: mod_base = OTHER; note = 2'-deoxy-2'-fluorouridine-3'-phosphate
  modified_base 15: mod_base = OTHER; note = 2'-O-methylguanosine-3'-phosphate
  modified_base 16: mod_base = OTHER; note = 2'-deoxy-2'-fluorocytidine-3'-phosphate
  modified_base 17: mod_base = OTHER; note = 2'-O-methyluridine-3'-phosphate
  modified_base 18: mod_base = OTHER; note = 2'-deoxy-2'-fluorouridine-3'-phosphate
  modified_base 19: mod_base = OTHER; note = 2'-O-methylcytidine-3'-phosphate
  modified_base 20: mod_base = OTHER; note = 2'-deoxy-2'-fluorocytidine-3'-phosphate
  modified_base 21: mod_base = OTHER; note = 2'-O-methyladenosine-3'-phosphorothioate
  modified_base 22: mod_base = OTHER; note = 2'-O-methyladenosine-3'-phosphorothioate
  modified_base 23: mod_base = OTHER; note = 2'-O-methyladenosine
tccatcaacatactgcttccaaa

SEQ ID NO: 247 - RNA, 21 nt, synthetic construct
  source 1..21: mol_type = other RNA
  modified_base 1: mod_base = OTHER; note = 5'-deoxy-5'-(N-morpholinyl)-2'-O,4'-C-methylene uridine-3'-phosphorothioate
  modified_base 2: mod_base = OTHER; note = 2'-O-methylguanosine-3'-phosphorothioate
  modified_base 3: mod_base = OTHER; note = 2'-deoxy-2'-fluoroguanosine-3'-phosphate
  modified_base 4: mod_base = OTHER; note = 2'-O-methyladenosine-3'-phosphate
  modified_base 5: mod_base = OTHER; note = 2'-deoxy-2'-fluoroadenosine-3'-phosphate
  modified_base 6: mod_base = OTHER; note = 2'-O-methylguanosine-3'-phosphate
  modified_base 7: mod_base = OTHER; note = 2'-deoxy-2'-fluorocytidine-3'-phosphate
  modified_base 8: mod_base = OTHER; note = 2'-O-methyladenosine-3'-phosphate
  modified_base 9: mod_base = OTHER; note = 2'-deoxy-2'-fluoroguanosine-3'-phosphate
  modified_base 10: mod_base = OTHER; note = 2'-deoxy-2'-fluorouridine-3'-phosphate
  modified_base 11: mod_base = OTHER; note = 2'-deoxy-2'-fluoroadenosine-3'-phosphate
  modified_base 12: mod_base = OTHER; note = 2'-O-methyluridine-3'-phosphate
  modified_base 13: mod_base = OTHER; note = 2'-deoxy-2'-fluoroguanosine-3'-phosphate
  modified_base 14: mod_base = OTHER; note = 2'-O-methyluridine-3'-phosphate
  modified_base 15: mod_base = OTHER; note = 2'-deoxy-2'-fluorouridine-3'-phosphate
  modified_base 16: mod_base = OTHER; note = 2'-O-methylguanosine-3'-phosphate
  modified_base 17: mod_base = OTHER; note = 2'-deoxy-2'-fluoroadenosine-3'-phosphate
  modified_base 18: mod_base = OTHER; note = 2'-O-methyluridine-3'-phosphate
  modified_base 19: mod_base = OTHER; note = 2'-deoxy-2'-fluoroguanosine-3'-phosphate
  modified_base 20: mod_base = OTHER; note = 2'-O-methylguanosine-3'-phosphate
  modified_base 21: mod_base = OTHER; note = 2'-deoxy-2'-fluoroadenosine-3'-phosphate ((2S,4R)-1-[29-[[2-(acetylamino)-2-deoxy-beta-D-galactopyra nosyl]oxy]-14,14-bis[[3-[[3-[[5-[[2-(acetylamino)-2-deoxy-b eta-D-galactopyranosyl]oxy]-1-oxopentyl]amino]propyl]amino] -3-oxopropoxy]methyl]-1,12,19,25-tetraoxo-16-oxa-13,20,24-t riazanonacos-1-yl]-4-hydroxy-2-pyrrolidinyl)methyl ester
tggaagcagtatgttgatgga

SEQ ID NO: 248 - RNA, 23 nt, synthetic construct
  source 1..23: mol_type = other RNA
  modified_base 1: mod_base = OTHER; note = 2'-O-methyluridine-3'-phosphorothioate 5'-(E)-Vinylphosphonate
  modified_base 2: mod_base = OTHER; note = 2'-deoxy-2'-fluorocytidine-3'-phosphorothioate
  modified_base 3: mod_base = OTHER; note = 2'-O-methylcytidine-3'-phosphate
  modified_base 4: mod_base = OTHER; note = 2'-deoxy-2'-fluoroadenosine-3'-phosphate
  modified_base 5: mod_base = OTHER; note = 2'-O-methyluridine-3'-phosphate
  modified_base 6: mod_base = OTHER; note = 2'-deoxy-2'-fluorocytidine-3'-phosphate
  modified_base 7: mod_base = OTHER; note = 2'-O-methyladenosine-3'-phosphate
  modified_base 8: mod_base = OTHER; note = 2'-deoxy-2'-fluoroadenosine-3'-phosphate
  modified_base 9: mod_base = OTHER; note = 2'-O-methylcytidine-3'-phosphate
  modified_base 10: mod_base = OTHER; note = 2'-deoxy-2'-fluoroadenosine-3'-phosphate
  modified_base 11: mod_base = OTHER; note = 2'-O-methyluridine-3'-phosphate
  modified_base 12: mod_base = OTHER; note = 2'-O-methyladenosine-3'-phosphate
  modified_base 13: mod_base = OTHER; note = 2'-O-methylcytidine-3'-phosphate
  modified_base 14: mod_base = OTHER; note = 2'-deoxy-2'-fluorouridine-3'-phosphate
  modified_base 15: mod_base = OTHER; note = 2'-O-methylguanosine-3'-phosphate
  modified_base 16: mod_base = OTHER; note = 2'-deoxy-2'-fluorocytidine-3'-phosphate
  modified_base 17: mod_base = OTHER; note = 2'-O-methyluridine-3'-phosphate
  modified_base 18: mod_base = OTHER; note = 2'-deoxy-2'-fluorouridine-3'-phosphate
  modified_base 19: mod_base = OTHER; note = 2'-O-methylcytidine-3'-phosphate
  modified_base 20: mod_base = OTHER; note = 2'-deoxy-2'-fluorocytidine-3'-phosphate
  modified_base 21: mod_base = OTHER; note = 2'-O-methyladenosine-3'-phosphorothioate
  modified_base 22: mod_base = OTHER; note = 2'-O-methyladenosine-3'-phosphorothioate
  modified_base 23: mod_base = OTHER; note = 2'-O-methyladenosine
tccatcaacatactgcttccaaa

SEQ ID NO: 249 - RNA, 21 nt, synthetic construct
  source 1..21: mol_type = other RNA
  modified_base 1: mod_base = OTHER; note = 5'-deoxy-5'-(N-morpholinyl)-2'-O,4'-C-methylene uridine-3'-phosphorothioate
  modified_base 2: mod_base = OTHER; note = 2'-O-methylguanosine-3'-phosphate
  modified_base 3: mod_base = OTHER; note = 2'-deoxy-2'-fluoroguanosine-3'-phosphate
  modified_base 4: mod_base = OTHER; note = 2'-O-methyladenosine-3'-phosphate
  modified_base 5: mod_base = OTHER; note = 2'-deoxy-2'-fluoroadenosine-3'-phosphate
  modified_base 6: mod_base = OTHER; note = 2'-O-methylguanosine-3'-phosphate
  modified_base 7: mod_base = OTHER; note = 2'-deoxy-2'-fluorocytidine-3'-phosphate
  modified_base 8: mod_base = OTHER; note = 2'-O-methyladenosine-3'-phosphate
  modified_base 9: mod_base = OTHER; note = 2'-deoxy-2'-fluoroguanosine-3'-phosphate
  modified_base 10: mod_base = OTHER; note = 2'-deoxy-2'-fluorouridine-3'-phosphate
  modified_base 11: mod_base = OTHER; note = 2'-deoxy-2'-fluoroadenosine-3'-phosphate
  modified_base 12: mod_base = OTHER; note = 2'-O-methyluridine-3'-phosphate
  modified_base 13: mod_base = OTHER; note = 2'-deoxy-2'-fluoroguanosine-3'-phosphate
  modified_base 14: mod_base = OTHER; note = 2'-O-methyluridine-3'-phosphate
  modified_base 15: mod_base = OTHER; note = 2'-deoxy-2'-fluorouridine-3'-phosphate
  modified_base 16: mod_base = OTHER; note = 2'-O-methylguanosine-3'-phosphate
  modified_base 17: mod_base = OTHER; note = 2'-deoxy-2'-fluoroadenosine-3'-phosphate
  modified_base 18: mod_base = OTHER; note = 2'-O-methyluridine-3'-phosphate
  modified_base 19: mod_base = OTHER; note = 2'-deoxy-2'-fluoroguanosine-3'-phosphate
  modified_base 20: mod_base = OTHER; note = 2'-O-methylguanosine-3'-phosphate
  modified_base 21: mod_base = OTHER; note = 2'-deoxy-2'-fluoroadenosine-3'-phosphate ((2S,4R)-1-[29-[[2-(acetylamino)-2-deoxy-beta-D-galactopyra nosyl]oxy]-14,14-bis[[3-[[3-[[5-[[2-(acetylamino)-2-deoxy-b eta-D-galactopyranosyl]oxy]-1-oxopentyl]amino]propyl]amino] -3-oxopropoxy]methyl]-1,12,19,25-tetraoxo-16-oxa-13,20,24-t riazanonacos-1-yl]-4-hydroxy-2-pyrrolidinyl)methyl ester
tggaagcagtatgttgatgga

SEQ ID NO: 250 - RNA, 23 nt, synthetic construct
  source 1..23: mol_type = other RNA
  modified_base 1: mod_base = OTHER; note = 2'-O-methyluridine-3'-phosphorothioate 5'-(E)-Vinylphosphonate
  modified_base 2: mod_base = OTHER; note = 2'-deoxy-2'-fluorocytidine-3'-phosphorothioate
  modified_base 3: mod_base = OTHER; note = 2'-O-methylcytidine-3'-phosphate
  modified_base 4: mod_base = OTHER; note = 2'-deoxy-2'-fluoroadenosine-3'-phosphate
  modified_base 5: mod_base = OTHER; note = 2'-O-methyluridine-3'-phosphate
  modified_base 6: mod_base = OTHER; note = 2'-deoxy-2'-fluorocytidine-3'-phosphate
  modified_base 7: mod_base = OTHER; note = 2'-O-methyladenosine-3'-phosphate
  modified_base 8: mod_base = OTHER; note = 2'-deoxy-2'-fluoroadenosine-3'-phosphate
  modified_base 9: mod_base = OTHER; note = 2'-O-methylcytidine-3'-phosphate
  modified_base 10: mod_base = OTHER; note = 2'-deoxy-2'-fluoroadenosine-3'-phosphate
  modified_base 11: mod_base = OTHER; note = 2'-O-methyluridine-3'-phosphate
  modified_base 12: mod_base = OTHER; note = 2'-O-methyladenosine-3'-phosphate
  modified_base 13: mod_base = OTHER; note = 2'-O-methylcytidine-3'-phosphate
  modified_base 14: mod_base = OTHER; note = 2'-deoxy-2'-fluorouridine-3'-phosphate
  modified_base 15: mod_base = OTHER; note = 2'-O-methylguanosine-3'-phosphate
  modified_base 16: mod_base = OTHER; note = 2'-deoxy-2'-fluorocytidine-3'-phosphate
  modified_base 17: mod_base = OTHER; note = 2'-O-methyluridine-3'-phosphate
  modified_base 18: mod_base = OTHER; note = 2'-deoxy-2'-fluorouridine-3'-phosphate
  modified_base 19: mod_base = OTHER; note = 2'-O-methylcytidine-3'-phosphate
  modified_base 20: mod_base = OTHER; note = 2'-deoxy-2'-fluorocytidine-3'-phosphate
  modified_base 21: mod_base = OTHER; note = 2'-O-methyladenosine-3'-phosphorothioate
  modified_base 22: mod_base = OTHER; note = 2'-O-methyladenosine-3'-phosphorothioate
  modified_base 23: mod_base = OTHER; note = 2'-O-methyladenosine
tccatcaacatactgcttccaaa

SEQ ID NO: 251 - RNA, 21 nt, synthetic construct
  source 1..21: mol_type = other RNA
  modified_base 1: mod_base = OTHER; note = 2'-O-methyladenosine-3'-phosphorothioate
  modified_base 2: mod_base = OTHER; note = 2'-O-methyladenosine-3'-phosphorothioate
  modified_base 3: mod_base = OTHER; note = 2'-O-methylcytidine-3'-phosphate
  modified_base 4: mod_base = OTHER; note = 2'-O-methyladenosine-3'-phosphate
  modified_base 5: mod_base = OTHER; note = 2'-O-methylguanosine-3'-phosphate
  modified_base 6: mod_base = OTHER; note = 2'-O-methyluridine-3'-phosphate
  modified_base 7: mod_base = OTHER; note = 2'-deoxy-2'-fluoroguanosine-3'-phosphate
  modified_base 8: mod_base = OTHER; note = 2'-O-methyluridine-3'-phosphate
  modified_base 9: mod_base = OTHER; note = 2'-deoxy-2'-fluorouridine-3'-phosphate
  modified_base 10: mod_base = OTHER; note = 2'-deoxy-2'-fluorocytidine-3'-phosphate
  modified_base 11: mod_base = OTHER; note = 2'-deoxy-2'-fluorouridine-3'-phosphate
  modified_base 12: mod_base = OTHER; note = 2'-O-methyluridine-3'-phosphate
  modified_base 13: mod_base = OTHER; note = 2'-O-methylguanosine-3'-phosphate
  modified_base 14: mod_base = OTHER; note = 2'-O-methylcytidine-3'-phosphate
  modified_base 15: mod_base = OTHER; note = 2'-O-methyluridine-3'-phosphate
  modified_base 16: mod_base = OTHER; note = 2'-O-methylcytidine-3'-phosphate
  modified_base 17: mod_base = OTHER; note = 2'-O-methyluridine-3'-phosphate
  modified_base 18: mod_base = OTHER; note = 2'-O-methyladenosine-3'-phosphate
  modified_base 19: mod_base = OTHER; note = 2'-O-methyluridine-3'-phosphate
  modified_base 20: mod_base = OTHER; note = 2'-O-methyladenosine-3'-phosphate
  modified_base 21: mod_base = OTHER; note = 2'-O-methyladenosine-3'-phosphate ((2S,4R)-1-[29-[[2-(acetylamino)-2-deoxy-beta-D-galactopyra nosyl]oxy]-14,14-bis[[3-[[3-[[5-[[2-(acetylamino)-2-deoxy-b eta-D-galactopyranosyl]oxy]-1-oxopentyl]amino]propyl]amino] -3-oxopropoxy]methyl]-1,12,19,25-tetraoxo-16-oxa-13,20,24-t riazanonacos-1-yl]-4-hydroxy-2-pyrrolidinyl)methyl ester
aacagtgttcttgctctataa

SEQ ID NO: 252 - RNA, 23 nt, synthetic construct
  source 1..23: mol_type = other RNA
  modified_base 1: mod_base = OTHER; note = 2'-O-methyluridine-3'-phosphorothioate
  modified_base 2: mod_base = OTHER; note = 2'-deoxy-2'-fluorouridine-3'-phosphorothioate
  modified_base 3: mod_base = OTHER; note = 2'-O-methyladenosine-3'-phosphate
  modified_base 4: mod_base = OTHER; note = 2'-O-methyluridine-3'-phosphate
  modified_base 5: mod_base = OTHER; note = 2'-O-methyladenosine-3'-phosphate
  modified_base 6: mod_base = OTHER; note = 2'-deoxy-2'-fluoroguanosine-3'-phosphate
  modified_base 7: mod_base = OTHER; note = 2'-O-methyladenosine-3'-phosphate
  modified_base 8: mod_base = OTHER; note = 2'-O-methylguanosine-3'-phosphate
  modified_base 9: mod_base = OTHER; note = 2'-O-methylcytidine-3'-phosphate
  modified_base 10: mod_base = OTHER; note = 2'-O-methyladenosine-3'-phosphate
  modified_base 11: mod_base = OTHER; note = 2'-O-methyladenosine-3'-phosphate
  modified_base 12: mod_base = OTHER; note = 2'-O-methylguanosine-3'-phosphate
  modified_base 13: mod_base = OTHER; note = 2'-O-methyladenosine-3'-phosphate
  modified_base 14: mod_base = OTHER; note = 2'-deoxy-2'-fluoroadenosine-3'-phosphate
  modified_base 15: mod_base = OTHER; note = 2'-O-methylcytidine-3'-phosphate
  modified_base 16: mod_base = OTHER; note = 2'-deoxy-2'-fluoroadenosine-3'-phosphate
  modified_base 17: mod_base = OTHER; note = 2'-O-methylcytidine-3'-phosphate
  modified_base 18: mod_base = OTHER; note = 2'-O-methyluridine-3'-phosphate
  modified_base 19: mod_base = OTHER; note = 2'-O-methylguanosine-3'-phosphate
  modified_base 20: mod_base = OTHER; note = 2'-O-methyluridine-3'-phosphate
  modified_base 21: mod_base = OTHER; note = 2'-O-methyluridine-3'-phosphorothioate
  modified_base 22: mod_base = OTHER; note = 2'-O-methyluridine-3'-phosphorothioate
  modified_base 23: mod_base = OTHER; note = 2'-O-methyluridine
ttatagagcaagaacactgtttt

SEQ ID NO: 253 - RNA, 21 nt, synthetic construct
  source 1..21: mol_type = other RNA
  modified_base 1: mod_base = OTHER; note = 2'-O-methyladenosine-3'-phosphorothioate
  modified_base 2: mod_base = OTHER; note = 2'-O-methyladenosine-3'-phosphorothioate
  modified_base 3: mod_base = OTHER; note = 2'-O-methylcytidine-3'-phosphate
  modified_base 4: mod_base = OTHER; note = 2'-O-methyladenosine-3'-phosphate
  modified_base 5: mod_base = OTHER; note = 2'-O-methylguanosine-3'-phosphate
  modified_base 6: mod_base = OTHER; note = 2'-O-methyluridine-3'-phosphate
  modified_base 7: mod_base = OTHER; note = 2'-deoxy-2'-fluoroguanosine-3'-phosphate
  modified_base 8: mod_base = OTHER; note = 2'-O-methyluridine-3'-phosphate
  modified_base 9: mod_base = OTHER; note = 2'-deoxy-2'-fluorouridine-3'-phosphate
  modified_base 10: mod_base = OTHER; note = 2'-deoxy-2'-fluorocytidine-3'-phosphate
  modified_base 11: mod_base = OTHER; note = 2'-deoxy-2'-fluorouridine-3'-phosphate
  modified_base 12: mod_base = OTHER; note = 2'-O-methyluridine-3'-phosphate
  modified_base 13: mod_base = OTHER; note = 2'-O-methylguanosine-3'-phosphate
  modified_base 14: mod_base = OTHER; note = 2'-O-methylcytidine-3'-phosphate
  modified_base 15: mod_base = OTHER; note = 2'-O-methyluridine-3'-phosphate
  modified_base 16: mod_base = OTHER; note = 2'-O-methylcytidine-3'-phosphate
  modified_base 17: mod_base = OTHER; note = 2'-O-methyluridine-3'-phosphate
  modified_base 18: mod_base = OTHER; note = 2'-O-methyladenosine-3'-phosphate
  modified_base 19: mod_base = OTHER; note = 2'-O-methyluridine-3'-phosphate
  modified_base 20: mod_base = OTHER; note = 2'-O-methyladenosine-3'-phosphate
  modified_base 21: mod_base = OTHER; note = 2'-O-methyladenosine-3'-phosphate ((2S,4R)-1-[29-[[2-(acetylamino)-2-deoxy-beta-D-galactopyra nosyl]oxy]-14,14-bis[[3-[[3-[[5-[[2-(acetylamino)-2-deoxy-b eta-D-galactopyranosyl]oxy]-1-oxopentyl]amino]propyl]amino] -3-oxopropoxy]methyl]-1,12,19,25-tetraoxo-16-oxa-13,20,24-t riazanonacos-1-yl]-4-hydroxy-2-pyrrolidinyl)methyl ester
aacagtgttcttgctctataa

SEQ ID NO: 254 - RNA, 23 nt, synthetic construct
  source 1..23: mol_type = other RNA
  modified_base 1: mod_base = OTHER; note 5'-deoxy-5'-(N-morpholinylmethyl)-2'-O-methyluridine-3'-pho sphorothioate
  modified_base 2: mod_base = OTHER; note = 2'-deoxy-2'-fluorouridine-3'-phosphorothioate
  modified_base 3: mod_base = OTHER; note = 2'-O-methyladenosine-3'-phosphate
  modified_base 4: mod_base = OTHER; note = 2'-O-methyluridine-3'-phosphate
  modified_base 5: mod_base = OTHER; note = 2'-O-methyladenosine-3'-phosphate
  modified_base 6: mod_base = OTHER; note = 2'-deoxy-2'-fluoroguanosine-3'-phosphate
  modified_base 7: mod_base = OTHER; note = 2'-O-methyladenosine-3'-phosphate
  modified_base 8: mod_base = OTHER; note = 2'-O-methylguanosine-3'-phosphate
  modified_base 9: mod_base = OTHER; note = 2'-O-methylcytidine-3'-phosphate
  modified_base 10: mod_base = OTHER; note = 2'-O-methyladenosine-3'-phosphate
  modified_base 11: mod_base = OTHER; note = 2'-O-methyladenosine-3'-phosphate
  modified_base 12: mod_base = OTHER; note = 2'-O-methylguanosine-3'-phosphate
  modified_base 13: mod_base = OTHER; note = 2'-O-methyladenosine-3'-phosphate
  modified_base 14: mod_base = OTHER; note = 2'-deoxy-2'-fluoroadenosine-3'-phosphate
  modified_base 15: mod_base = OTHER; note = 2'-O-methylcytidine-3'-phosphate
  modified_base 16: mod_base = OTHER; note = 2'-deoxy-2'-fluoroadenosine-3'-phosphate
  modified_base 17: mod_base = OTHER; note = 2'-O-methylcytidine-3'-phosphate
  modified_base 18: mod_base = OTHER; note = 2'-O-methyluridine-3'-phosphate
  modified_base 19: mod_base = OTHER; note = 2'-O-methylguanosine-3'-phosphate
  modified_base 20: mod_base = OTHER; note = 2'-O-methyluridine-3'-phosphate
  modified_base 21: mod_base = OTHER; note = 2'-O-methyluridine-3'-phosphorothioate
  modified_base 22: mod_base = OTHER; note = 2'-O-methyluridine-3'-phosphorothioate
  modified_base 23: mod_base = OTHER; note = 2'-O-methyluridine
ttatagagcaagaacactgtttt

SEQ ID NO: 255 - RNA, 21 nt, synthetic construct
  source 1..21: mol_type = other RNA
  modified_base 1: mod_base = OTHER; note = 2'-O-methyladenosine-3'-phosphorothioate
  modified_base 2: mod_base = OTHER; note = 2'-O-methyladenosine-3'-phosphorothioate
  modified_base 3: mod_base = OTHER; note = 2'-O-methylcytidine-3'-phosphate
  modified_base 4: mod_base = OTHER; note = 2'-O-methyladenosine-3'-phosphate
  modified_base 5: mod_base = OTHER; note = 2'-O-methylguanosine-3'-phosphate
  modified_base 6: mod_base = OTHER; note = 2'-O-methyluridine-3'-phosphate
  modified_base 7: mod_base = OTHER; note = 2'-deoxy-2'-fluoroguanosine-3'-phosphate
  modified_base 8: mod_base = OTHER; note = 2'-O-methyluridine-3'-phosphate
  modified_base 9: mod_base = OTHER; note = 2'-deoxy-2'-fluorouridine-3'-phosphate
  modified_base 10: mod_base = OTHER; note = 2'-deoxy-2'-fluorocytidine-3'-phosphate
  modified_base 11: mod_base = OTHER; note = 2'-deoxy-2'-fluorouridine-3'-phosphate
  modified_base 12: mod_base = OTHER; note = 2'-O-methyluridine-3'-phosphate
  modified_base 13: mod_base = OTHER; note = 2'-O-methylguanosine-3'-phosphate
  modified_base 14: mod_base = OTHER; note = 2'-O-methylcytidine-3'-phosphate
  modified_base 15: mod_base = OTHER; note = 2'-O-methyluridine-3'-phosphate
  modified_base 16: mod_base = OTHER; note = 2'-O-methylcytidine-3'-phosphate
  modified_base 17: mod_base = OTHER; note = 2'-O-methyluridine-3'-phosphate
  modified_base 18: mod_base = OTHER; note = 2'-O-methyladenosine-3'-phosphate
  modified_base 19: mod_base = OTHER; note = 2'-O-methyluridine-3'-phosphate
  modified_base 20: mod_base = OTHER; note = 2'-O-methyladenosine-3'-phosphate
  modified_base 21: mod_base = OTHER; note = 2'-O-methyladenosine-3'-phosphate ((2S,4R)-1-[29-[[2-(acetylamino)-2-deoxy-beta-D-galactopyra nosyl]oxy]-14,14-bis[[3-[[3-[[5-[[2-(acetylamino)-2-deoxy-b eta-D-galactopyranosyl]oxy]-1-oxopentyl]amino]propyl]amino] -3-oxopropoxy]methyl]-1,12,19,25-tetraoxo-16-oxa-13,20,24-t riazanonacos-1-yl]-4-hydroxy-2-pyrrolidinyl)methyl ester
aacagtgttcttgctctataa

SEQ ID NO: 256 - RNA, 23 nt, synthetic construct
  source 1..23: mol_type = other RNA
  modified_base 1: mod_base = OTHER; note 5'-deoxy-5'-(N-morpholinylmethyl)-2'-O-methyluridine-3'-pho sphorothioate
  modified_base 2: mod_base = OTHER; note = 2'-O-methyluridine-3'-phosphorothioate
  modified_base 3: mod_base = OTHER; note = 2'-O-methyladenosine-3'-phosphate
  modified_base 4: mod_base = OTHER; note = 2'-O-methyluridine-3'-phosphate
  modified_base 5: mod_base = OTHER; note = 2'-O-methyladenosine-3'-phosphate
  modified_base 6: mod_base = OTHER; note = 2'-deoxy-2'-fluoroguanosine-3'-phosphate
  modified_base 7: mod_base = OTHER; note = 2'-O-methyladenosine-3'-phosphate
  modified_base 8: mod_base = OTHER; note = 2'-O-methylguanosine-3'-phosphate
  modified_base 9: mod_base = OTHER; note = 2'-O-methylcytidine-3'-phosphate
  modified_base 10: mod_base = OTHER; note = 2'-O-methyladenosine-3'-phosphate
  modified_base 11: mod_base = OTHER; note = 2'-O-methyladenosine-3'-phosphate
  modified_base 12: mod_base = OTHER; note = 2'-O-methylguanosine-3'-phosphate
  modified_base 13: mod_base = OTHER; note = 2'-O-methyladenosine-3'-phosphate
  modified_base 14: mod_base = OTHER; note = 2'-deoxy-2'-fluoroadenosine-3'-phosphate
  modified_base 15: mod_base = OTHER; note = 2'-O-methylcytidine-3'-phosphate
  modified_base 16: mod_base = OTHER; note = 2'-deoxy-2'-fluoroadenosine-3'-phosphate
  modified_base 17: mod_base = OTHER; note = 2'-O-methylcytidine-3'-phosphate
  modified_base 18: mod_base = OTHER; note = 2'-O-methyluridine-3'-phosphate
  modified_base 19: mod_base = OTHER; note = 2'-O-methylguanosine-3'-phosphate
  modified_base 20: mod_base = OTHER; note = 2'-O-methyluridine-3'-phosphate
  modified_base 21: mod_base = OTHER; note = 2'-O-methyluridine-3'-phosphorothioate
  modified_base 22: mod_base = OTHER; note = 2'-O-methyluridine-3'-phosphorothioate
  modified_base 23: mod_base = OTHER; note = 2'-O-methyluridine
ttatagagcaagaacactgtttt

SEQ ID NO: 257 - RNA, 21 nt, synthetic construct
  source 1..21: mol_type = other RNA
  modified_base 1: mod_base = OTHER; note = 2'-O-methyladenosine-3'-phosphorothioate
  modified_base 2: mod_base = OTHER; note = 2'-O-methyladenosine-3'-phosphorothioate
  modified_base 3: mod_base = OTHER; note = 2'-O-methylcytidine-3'-phosphate
  modified_base 4: mod_base = OTHER; note = 2'-O-methyladenosine-3'-phosphate
  modified_base 5: mod_base = OTHER; note = 2'-O-methylguanosine-3'-phosphate
  modified_base 6: mod_base = OTHER; note = 2'-O-methyluridine-3'-phosphate
  modified_base 7: mod_base = OTHER; note = 2'-deoxy-2'-fluoroguanosine-3'-phosphate
  modified_base 8: mod_base = OTHER; note = 2'-O-methyluridine-3'-phosphate
  modified_base 9: mod_base = OTHER; note = 2'-deoxy-2'-fluorouridine-3'-phosphate
  modified_base 10: mod_base = OTHER; note = 2'-deoxy-2'-fluorocytidine-3'-phosphate
  modified_base 11: mod_base = OTHER; note = 2'-deoxy-2'-fluorouridine-3'-phosphate
  modified_base 12: mod_base = OTHER; note = 2'-O-methyluridine-3'-phosphate
  modified_base 13: mod_base = OTHER; note = 2'-O-methylguanosine-3'-phosphate
  modified_base 14: mod_base = OTHER; note = 2'-O-methylcytidine-3'-phosphate
  modified_base 15: mod_base = OTHER; note = 2'-O-methyluridine-3'-phosphate
  modified_base 16: mod_base = OTHER; note = 2'-O-methylcytidine-3'-phosphate
  modified_base 17: mod_base = OTHER; note = 2'-O-methyluridine-3'-phosphate
  modified_base 18: mod_base = OTHER; note = 2'-O-methyladenosine-3'-phosphate
  modified_base 19: mod_base = OTHER; note = 2'-O-methyluridine-3'-phosphate
  modified_base 20: mod_base = OTHER; note = 2'-O-methyladenosine-3'-phosphate
  modified_base 21: mod_base = OTHER; note = 2'-O-methyladenosine-3'-phosphate ((2S,4R)-1-[29-[[2-(acetylamino)-2-deoxy-beta-D-galactopyra nosyl]oxy]-14,14-bis[[3-[[3-[[5-[[2-(acetylamino)-2-deoxy-b eta-D-galactopyranosyl]oxy]-1-oxopentyl]amino]propyl]amino] -3-oxopropoxy]methyl]-1,12,19,25-tetraoxo-16-oxa-13,20,24-t riazanonacos-1-yl]-4-hydroxy-2-pyrrolidinyl)methyl ester
aacagtgttcttgctctataa

SEQ ID NO: 258 - RNA, 23 nt, synthetic construct
  source 1..23: mol_type = other RNA
  modified_base 1: mod_base = OTHER; note = 2'-O-methyluridine-3'-phosphorothioate
  modified_base 2: mod_base = OTHER; note = 2'-O-methyluridine-3'-phosphorothioate
  modified_base 3: mod_base = OTHER; note = 2'-O-methyladenosine-3'-phosphate
  modified_base 4: mod_base = OTHER; note = 2'-O-methyluridine-3'-phosphate
  modified_base 5: mod_base = OTHER; note = 2'-O-methyladenosine-3'-phosphate
  modified_base 6: mod_base = OTHER; note = 2'-deoxy-2'-fluoroguanosine-3'-phosphate
  modified_base 7: mod_base = OTHER; note = 2'-O-methyladenosine-3'-phosphate
  modified_base 8: mod_base = OTHER; note = 2'-O-methylguanosine-3'-phosphate
  modified_base 9: mod_base = OTHER; note = 2'-O-methylcytidine-3'-phosphate
  modified_base 10: mod_base = OTHER; note = 2'-O-methyladenosine-3'-phosphate
  modified_base 11: mod_base = OTHER; note = 2'-O-methyladenosine-3'-phosphate
  modified_base 12: mod_base = OTHER; note = 2'-O-methylguanosine-3'-phosphate
  modified_base 13: mod_base = OTHER; note = 2'-O-methyladenosine-3'-phosphate
  modified_base 14: mod_base = OTHER; note = 2'-deoxy-2'-fluoroadenosine-3'-phosphate
  modified_base 15: mod_base = OTHER; note = 2'-O-methylcytidine-3'-phosphate
  modified_base 16: mod_base = OTHER; note = 2'-deoxy-2'-fluoroadenosine-3'-phosphate
  modified_base 17: mod_base = OTHER; note = 2'-O-methylcytidine-3'-phosphate
  modified_base 18: mod_base = OTHER; note = 2'-O-methyluridine-3'-phosphate
  modified_base 19: mod_base = OTHER; note = 2'-O-methylguanosine-3'-phosphate
  modified_base 20: mod_base = OTHER; note = 2'-O-methyluridine-3'-phosphate
  modified_base 21: mod_base = OTHER; note = 2'-O-methyluridine-3'-phosphorothioate
  modified_base 22: mod_base = OTHER; note = 2'-O-methyluridine-3'-phosphorothioate
  modified_base 23: mod_base = OTHER; note = 2'-O-methyluridine
ttatagagcaagaacactgtttt

SEQ ID NO: 259 - DNA, 19 bp, synthetic construct
  source 1..19: mol_type = other DNA
taatattacataaataaaa

SEQ ID NO: 260 - RNA, 21 nt, synthetic construct
  source 1..21: mol_type = other RNA
  modified_base 1: mod_base = OTHER; note = 2'-deoxy-2'-fluoroadenosine-3'-phosphorothioate
  modified_base 2: mod_base = OTHER; note = 2'-O-methyladenosine-3'-phosphorothioate
  modified_base 3: mod_base = OTHER; note = 2'-deoxy-2'-fluorocytidine-3'-phosphate
  modified_base 4: mod_base = OTHER; note = 2'-O-methyladenosine-3'-phosphate
  modified_base 5: mod_base = OTHER; note = 2'-deoxy-2'-fluoroguanosine-3'-phosphate
  modified_base 6: mod_base = OTHER; note = 2'-O-methyluridine-3'-phosphate
  modified_base 7: mod_base = OTHER; note = 2'-deoxy-2'-fluoroguanosine-3'-phosphate
  modified_base 8: mod_base = OTHER; note = 2'-O-methyluridine-3'-phosphate
  modified_base 9: mod_base = OTHER; note = 2'-deoxy-2'-fluorouridine-3'-phosphate
  modified_base 10: mod_base = OTHER; note = 2'-deoxy-2'-fluorocytidine-3'-phosphate
  modified_base 11: mod_base = OTHER; note = 2'-deoxy-2'-fluorouridine-3'-phosphate
  modified_base 12: mod_base = OTHER; note = 2'-O-methyluridine-3'-phosphate
  modified_base 13: mod_base = OTHER; note = 2'-deoxy-2'-fluoroguanosine-3'-phosphate
  modified_base 14: mod_base = OTHER; note = 2'-O-methylcytidine-3'-phosphate
  modified_base 15: mod_base = OTHER; note = 2'-deoxy-2'-fluorouridine-3'-phosphate
  modified_base 16: mod_base = OTHER; note = 2'-O-methylcytidine-3'-phosphate
  modified_base 17: mod_base = OTHER; note = 2'-deoxy-2'-fluorouridine-3'-phosphate
  modified_base 18: mod_base = OTHER; note = 2'-O-methyladenosine-3'-phosphate
  modified_base 19: mod_base = OTHER; note = 2'-deoxy-2'-fluorouridine-3'-phosphorothioate
  modified_base 20: mod_base = OTHER; note = 2'-O-methyladenosine-3'-phosphorothioate
  modified_base 21: mod_base = OTHER; note = 2'-deoxy-2'-fluoroadenosine
aacagtgttcttgctctataa

SEQ ID NO: 261 - RNA, 23 nt, synthetic construct
  source 1..23: mol_type = other RNA
  modified_base 1: mod_base = OTHER; note = 2'-O-methyluridine-3'-phosphorothioate
  modified_base 2: mod_base = OTHER; note = 2'-deoxy-2'-fluorouridine-3'-phosphorothioate
  modified_base 3: mod_base = OTHER; note = 2'-O-methyladenosine-3'-phosphate
  modified_base 4: mod_base = OTHER; note = 2'-deoxy-2'-fluorouridine-3'-phosphate
  modified_base 5: mod_base = OTHER; note = 2'-O-methyladenosine-3'-phosphate
  modified_base 6: mod_base = OTHER; note = 2'-deoxy-2'-fluoroguanosine-3'-phosphate
  modified_base 7: mod_base = OTHER; note = 2'-O-methyladenosine-3'-phosphate
  modified_base 8: mod_base = OTHER; note = 2'-deoxy-2'-fluoroguanosine-3'-phosphate
  modified_base 9: mod_base = OTHER; note = 2'-O-methylcytidine-3'-phosphate
  modified_base 10: mod_base = OTHER; note = 2'-deoxy-2'-fluoroadenosine-3'-phosphate
  modified_base 11: mod_base = OTHER; note = 2'-O-methyladenosine-3'-phosphate
  modified_base 12: mod_base = OTHER; note = 2'-O-methylguanosine-3'-phosphate
  modified_base 13: mod_base = OTHER; note = 2'-O-methyladenosine-3'-phosphate
  modified_base 14: mod_base = OTHER; note = 2'-deoxy-2'-fluoroadenosine-3'-phosphate
  modified_base 15: mod_base = OTHER; note = 2'-O-methylcytidine-3'-phosphate
  modified_base 16: mod_base = OTHER; note = 2'-deoxy-2'-fluoroadenosine-3'-phosphate
  modified_base 17: mod_base = OTHER; note = 2'-O-methylcytidine-3'-phosphate
  modified_base 18: mod_base = OTHER; note = 2'-deoxy-2'-fluorouridine-3'-phosphate
  modified_base 19: mod_base = OTHER; note = 2'-O-methylguanosine-3'-phosphate
  modified_base 20: mod_base = OTHER; note = 2'-deoxy-2'-fluorouridine-3'-phosphate
  modified_base 21: mod_base = OTHER; note = 2'-O-methyluridine-3'-phosphorothioate
  modified_base 22: mod_base = OTHER; note = 2'-O-methyluridine-3'-phosphorothioate
  modified_base 23: mod_base = OTHER; note = 2'-O-methyluridine-3'-phosphate ((2S,4R)-1-[29-[[2-(acetylamino)-2-deoxy-beta-D-galactopyra nosyl]oxy]-14,14-bis[[3-[[3-[[5-[[2-(acetylamino)-2-deoxy-b eta-D-galactopyranosyl]oxy]-1-oxopentyl]amino]propyl]amino] -3-oxopropoxy]methyl]-1,12,19,25-tetraoxo-16-oxa-13,20,24-t riazanonacos-1-yl]-4-hydroxy-2-pyrrolidinyl)methyl ester
ttatagagcaagaacactgtttt

SEQ ID NO: 262 - RNA, 21 nt, synthetic construct
  source 1..21: mol_type = other RNA
  modified_base 1: mod_base = OTHER; note = 2'-deoxy-2'-fluoroadenosine-3'-phosphorothioate
  modified_base 2: mod_base = OTHER; note = 2'-O-methyladenosine-3'-phosphorothioate
  modified_base 3: mod_base = OTHER; note = 2'-deoxy-2'-fluorocytidine-3'-phosphate
  modified_base 4: mod_base = OTHER; note = 2'-O-methyladenosine-3'-phosphate
  modified_base 5: mod_base = OTHER; note = 2'-deoxy-2'-fluoroguanosine-3'-phosphate
  modified_base 6: mod_base = OTHER; note = 2'-O-methyluridine-3'-phosphate
  modified_base 7: mod_base = OTHER; note = 2'-deoxy-2'-fluoroguanosine-3'-phosphate
  modified_base 8: mod_base = OTHER; note = 2'-O-methyluridine-3'-phosphate
  modified_base 9: mod_base = OTHER; note = 2'-deoxy-2'-fluorouridine-3'-phosphate
  modified_base 10: mod_base = OTHER; note = 2'-deoxy-2'-fluorocytidine-3'-phosphate
  modified_base 11: mod_base = OTHER; note = 2'-deoxy-2'-fluorouridine-3'-phosphate
  modified_base 12: mod_base = OTHER; note = 2'-O-methyluridine-3'-phosphate
  modified_base 13: mod_base = OTHER; note = 2'-deoxy-2'-fluoroguanosine-3'-phosphate
  modified_base 14: mod_base = OTHER; note = 2'-O-methylcytidine-3'-phosphate
  modified_base 15: mod_base = OTHER; note = 2'-deoxy-2'-fluorouridine-3'-phosphate
  modified_base 16: mod_base = OTHER; note = 2'-O-methylcytidine-3'-phosphate
  modified_base 17: mod_base = OTHER; note = 2'-deoxy-2'-fluorouridine-3'-phosphate
  modified_base 18: mod_base = OTHER; note = 2'-O-methyladenosine-3'-phosphate
  modified_base 19: mod_base = OTHER; note = 2'-deoxy-2'-fluorouridine-3'-phosphate
  modified_base 20: mod_base = OTHER; note = 2'-O-methyladenosine-3'-phosphate
  modified_base 21: mod_base = OTHER; note = 2'-deoxy-2'-fluoroadenosine-3'-phosphate (4R-((((4R-(hydroxy)-1-(6-((S)-2-(4-isobutylphenyl)propanam ido)hexanoyl)pyrrolidin-2S-yl)methoxy)hydroxyphosphoryl)oxy )-1-(6-((S)-2-(4-isobutylphenyl)propanamido)hexanoyl)pyrrol idin-2S-yl)methyl ester
aacagtgttcttgctctataa

SEQ ID NO: 263 - RNA, 23 nt, synthetic construct
  source 1..23: mol_type = other RNA
  modified_base 1: mod_base = OTHER; note = 2'-O-methyluridine-3'-phosphorothioate
  modified_base 2: mod_base = OTHER; note = 2'-deoxy-2'-fluorouridine-3'-phosphorothioate
  modified_base 3: mod_base = OTHER; note = 2'-O-methyladenosine-3'-phosphate
  modified_base 4: mod_base = OTHER; note = 2'-deoxy-2'-fluorouridine-3'-phosphate
  modified_base 5: mod_base = OTHER; note = 2'-O-methyladenosine-3'-phosphate
  modified_base 6: mod_base = OTHER; note = 2'-deoxy-2'-fluoroguanosine-3'-phosphate
  modified_base 7: mod_base = OTHER; note = 2'-O-methyladenosine-3'-phosphate
  modified_base 8: mod_base = OTHER; note = 2'-deoxy-2'-fluoroguanosine-3'-phosphate
  modified_base 9: mod_base = OTHER; note = 2'-O-methylcytidine-3'-phosphate
  modified_base 10: mod_base = OTHER; note = 2'-deoxy-2'-fluoroadenosine-3'-phosphate
  modified_base 11: mod_base = OTHER; note = 2'-O-methyladenosine-3'-phosphate
  modified_base 12: mod_base = OTHER; note = 2'-O-methylguanosine-3'-phosphate
  modified_base 13: mod_base = OTHER; note = 2'-O-methyladenosine-3'-phosphate
  modified_base 14: mod_base = OTHER; note = 2'-deoxy-2'-fluoroadenosine-3'-phosphate
  modified_base 15: mod_base = OTHER; note = 2'-O-methylcytidine-3'-phosphate
  modified_base 16: mod_base = OTHER; note = 2'-deoxy-2'-fluoroadenosine-3'-phosphate
  modified_base 17: mod_base = OTHER; note = 2'-O-methylcytidine-3'-phosphate
  modified_base 18: mod_base = OTHER; note = 2'-deoxy-2'-fluorouridine-3'-phosphate
  modified_base 19: mod_base = OTHER; note = 2'-O-methylguanosine-3'-phosphate
  modified_base 20: mod_base = OTHER; note = 2'-deoxy-2'-fluorouridine-3'-phosphate
  modified_base 21: mod_base = OTHER; note = 2'-O-methyluridine-3'-phosphorothioate
  modified_base 22: mod_base = OTHER; note = 2'-O-methyluridine-3'-phosphorothioate
  modified_base 23: mod_base = OTHER; note = 2'-O-methyluridine-3'-phosphate ((2S,4R)-1-[29-[[2-(acetylamino)-2-deoxy-beta-D-galactopyra nosyl]oxy]-14,14-bis[[3-[[3-[[5-[[2-(acetylamino)-2-deoxy-b eta-D-galactopyranosyl]oxy]-1-oxopentyl]amino]propyl]amino] -3-oxopropoxy]methyl]-1,12,19,25-tetraoxo-16-oxa-13,20,24-t riazanonacos-1-yl]-4-hydroxy-2-pyrrolidinyl)methyl ester
ttatagagcaagaacactgtttt

SEQ ID NO: 264 - RNA, 21 nt, synthetic construct
  source 1..21: mol_type = other RNA
  modified_base 1: mod_base = OTHER; note = 2'-deoxy-2'-fluoroadenosine-3'-phosphorothioate
  modified_base 2: mod_base = OTHER; note = 2'-O-methyladenosine-3'-phosphorothioate
  modified_base 3: mod_base = OTHER; note = 2'-deoxy-2'-fluorocytidine-3'-phosphate
  modified_base 4: mod_base = OTHER; note = 2'-O-methyladenosine-3'-phosphate
  modified_base 5: mod_base = OTHER; note = 2'-deoxy-2'-fluoroguanosine-3'-phosphate
  modified_base 6: mod_base = OTHER; note = 2'-O-methyluridine-3'-phosphate
  modified_base 7: mod_base = OTHER; note = 2'-deoxy-2'-fluoroguanosine-3'-phosphate
  modified_base 8: mod_base = OTHER; note = 2'-O-methyluridine-3'-phosphate
  modified_base 9: mod_base = OTHER; note = 2'-deoxy-2'-fluorouridine-3'-phosphate
  modified_base 10: mod_base = OTHER; note = 2'-deoxy-2'-fluorocytidine-3'-phosphate
  modified_base 11: mod_base = OTHER; note = 2'-deoxy-2'-fluorouridine-3'-phosphate
  modified_base 12: mod_base = OTHER; note = 2'-O-methyluridine-3'-phosphate
  modified_base 13: mod_base = OTHER; note = 2'-deoxy-2'-fluoroguanosine-3'-phosphate
  modified_base 14: mod_base = OTHER; note = 2'-O-methylcytidine-3'-phosphate
  modified_base 15: mod_base = OTHER; note = 2'-deoxy-2'-fluorouridine-3'-phosphate
  modified_base 16: mod_base = OTHER; note = 2'-O-methylcytidine-3'-phosphate
  modified_base 17: mod_base = OTHER; note = 2'-deoxy-2'-fluorouridine-3'-phosphate
  modified_base 18: mod_base = OTHER; note = 2'-O-methyladenosine-3'-phosphate
  modified_base 19: mod_base = OTHER; note = 2'-deoxy-2'-fluorouridine-3'-phosphate
  modified_base 20: mod_base = OTHER; note = 2'-O-methyladenosine-3'-phosphate
  modified_base 21: mod_base = OTHER; note = 2'-deoxy-2'-fluoroadenosine-3'-phosphate (4R-((((4R-((((4R-hydroxy-1-(6-((S)-2-(4-isobutylphenyl)pro panamido)hexanoyl)pyrrolidin-2S-yl)methoxy)hydroxyphosphory l)oxy)-1-(6-((S)-2-(4-isobutylphenyl)propanamido)hexanoyl)p yrrolidin-2S-yl)methoxy)hydroxyphosphoryl)oxy)-1-(6-((S)-2- (4-isobutylphenyl)propanamido)hexanoyl)pyrrolidin-2S-yl)met hyl ester
aacagtgttcttgctctataa

SEQ ID NO: 265 - RNA, 23 nt, synthetic construct
  source 1..23: mol_type = other RNA
  modified_base 1: mod_base = OTHER; note = 2'-O-methyluridine-3'-phosphorothioate
  modified_base 2: mod_base = OTHER; note = 2'-deoxy-2'-fluorouridine-3'-phosphorothioate
  modified_base 3: mod_base = OTHER; note = 2'-O-methyladenosine-3'-phosphate
  modified_base 4: mod_base = OTHER; note = 2'-deoxy-2'-fluorouridine-3'-phosphate
  modified_base 5: mod_base = OTHER; note = 2'-O-methyladenosine-3'-phosphate
  modified_base 6: mod_base = OTHER; note = 2'-deoxy-2'-fluoroguanosine-3'-phosphate
  modified_base 7: mod_base = OTHER; note = 2'-O-methyladenosine-3'-phosphate
  modified_base 8: mod_base = OTHER; note = 2'-deoxy-2'-fluoroguanosine-3'-phosphate
  modified_base 9: mod_base = OTHER; note = 2'-O-methylcytidine-3'-phosphate
  modified_base 10: mod_base = OTHER; note = 2'-deoxy-2'-fluoroadenosine-3'-phosphate
  modified_base 11: mod_base = OTHER; note = 2'-O-methyladenosine-3'-phosphate
  modified_base 12: mod_base = OTHER; note = 2'-O-methylguanosine-3'-phosphate
  modified_base 13: mod_base = OTHER; note = 2'-O-methyladenosine-3'-phosphate
  modified_base 14: mod_base = OTHER; note = 2'-deoxy-2'-fluoroadenosine-3'-phosphate
  modified_base 15: mod_base = OTHER; note = 2'-O-methylcytidine-3'-phosphate
  modified_base 16: mod_base = OTHER; note = 2'-deoxy-2'-fluoroadenosine-3'-phosphate
  modified_base 17: mod_base = OTHER; note = 2'-O-methylcytidine-3'-phosphate
  modified_base 18: mod_base = OTHER; note = 2'-deoxy-2'-fluorouridine-3'-phosphate
  modified_base 19: mod_base = OTHER; note = 2'-O-methylguanosine-3'-phosphate
  modified_base 20: mod_base = OTHER; note = 2'-deoxy-2'-fluorouridine-3'-phosphate
  modified_base 21: mod_base = OTHER; note = 2'-O-methyluridine-3'-phosphorothioate
  modified_base 22: mod_base = OTHER; note = 2'-O-methyluridine-3'-phosphorothioate
  modified_base 23: mod_base = OTHER; note = 2'-O-methyluridine-3'-phosphate ((2S,4R)-1-[29-[[2-(acetylamino)-2-deoxy-beta-D-galactopyra nosyl]oxy]-14,14-bis[[3-[[3-[[5-[[2-(acetylamino)-2-deoxy-b eta-D-galactopyranosyl]oxy]-1-oxopentyl]amino]propyl]amino] -3-oxopropoxy]methyl]-1,12,19,25-tetraoxo-16-oxa-13,20,24-t riazanonacos-1-yl]-4-hydroxy-2-pyrrolidinyl)methyl ester
ttatagagcaagaacactgtttt

SEQ ID NO: 266 - RNA, 21 nt, synthetic construct
  source 1..21: mol_type = other RNA
  modified_base 1: mod_base = OTHER; note = 2'-deoxy-2'-fluoroadenosine-3'-phosphorothioate
  modified_base 2: mod_base = OTHER; note = 2'-O-methyladenosine-3'-phosphorothioate
  modified_base 3: mod_base = OTHER; note = 2'-deoxy-2'-fluorocytidine-3'-phosphate
  modified_base 4: mod_base = OTHER; note = 2'-O-methyladenosine-3'-phosphate
  modified_base 5: mod_base = OTHER; note = 2'-deoxy-2'-fluoroguanosine-3'-phosphate
  modified_base 6: mod_base = OTHER; note = 2'-O-methyluridine-3'-phosphate
  modified_base 7: mod_base = OTHER; note = 2'-deoxy-2'-fluoroguanosine-3'-phosphate
  modified_base 8: mod_base = OTHER; note = 2'-O-methyluridine-3'-phosphate
  modified_base 9: mod_base = OTHER; note = 2'-deoxy-2'-fluorouridine-3'-phosphate
  modified_base 10: mod_base = OTHER; note = 2'-deoxy-2'-fluorocytidine-3'-phosphate
  modified_base 11: mod_base = OTHER; note = 2'-deoxy-2'-fluorouridine-3'-phosphate
  modified_base 12: mod_base = OTHER; note = 2'-O-methyluridine-3'-phosphate
  modified_base 13: mod_base = OTHER; note = 2'-deoxy-2'-fluoroguanosine-3'-phosphate
  modified_base 14: mod_base = OTHER; note = 2'-O-methylcytidine-3'-phosphate
  modified_base 15: mod_base = OTHER; note = 2'-deoxy-2'-fluorouridine-3'-phosphate
  modified_base 16: mod_base = OTHER; note = 2'-O-methylcytidine-3'-phosphate
  modified_base 17: mod_base = OTHER; note = 2'-deoxy-2'-fluorouridine-3'-phosphate
  modified_base 18: mod_base = OTHER; note = 2'-O-methyladenosine-3'-phosphate
  modified_base 19: mod_base = OTHER; note = 2'-deoxy-2'-fluorouridine-3'-phosphorothioate
  modified_base 20: mod_base = OTHER; note = 2'-O-methyladenosine-3'-phosphorothioate
  modified_base 21: mod_base = OTHER; note = 2'-deoxy-2'-fluoroadenosine
aacagtgttcttgctctataa

SEQ ID NO: 267 - RNA, 23 nt, synthetic construct
  source 1..23: mol_type = other RNA
  modified_base 1: mod_base = OTHER; note = 2'-O-methyluridine-3'-phosphorothioate
  modified_base 2: mod_base = OTHER; note = 2'-deoxy-2'-fluorouridine-3'-phosphorothioate
  modified_base 3: mod_base = OTHER; note = 2'-O-methyladenosine-3'-phosphate
  modified_base 4: mod_base = OTHER; note = 2'-deoxy-2'-fluorouridine-3'-phosphate
  modified_base 5: mod_base = OTHER; note = 2'-O-methyladenosine-3'-phosphate
  modified_base 6: mod_base = OTHER; note = 2'-deoxy-2'-fluoroguanosine-3'-phosphate
  modified_base 7: mod_base = OTHER; note = 2'-O-methyladenosine-3'-phosphate
  modified_base 8: mod_base = OTHER; note = 2'-deoxy-2'-fluoroguanosine-3'-phosphate
  modified_base 9: mod_base = OTHER; note = 2'-O-methylcytidine-3'-phosphate
  modified_base 10: mod_base = OTHER; note = 2'-deoxy-2'-fluoroadenosine-3'-phosphate
  modified_base 11: mod_base = OTHER; note = 2'-O-methyladenosine-3'-phosphate
  modified_base 12: mod_base = OTHER; note = 2'-O-methylguanosine-3'-phosphate
  modified_base 13: mod_base = OTHER; note = 2'-O-methyladenosine-3'-phosphate
  modified_base 14: mod_base = OTHER; note = 2'-deoxy-2'-fluoroadenosine-3'-phosphate
  modified_base 15: mod_base = OTHER; note = 2'-O-methylcytidine-3'-phosphate
  modified_base 16: mod_base = OTHER; note = 2'-deoxy-2'-fluoroadenosine-3'-phosphate
  modified_base 17: mod_base = OTHER; note = 2'-O-methylcytidine-3'-phosphate
  modified_base 18: mod_base = OTHER; note = 2'-deoxy-2'-fluorouridine-3'-phosphate
  modified_base 19: mod_base = OTHER; note = 2'-O-methylguanosine-3'-phosphate
  modified_base 20: mod_base = OTHER; note = 2'-deoxy-2'-fluorouridine-3'-phosphate
  modified_base 21: mod_base = OTHER; note = 2'-O-methyluridine-3'-phosphorothioate
  modified_base 22: mod_base = OTHER; note = 2'-O-methyluridine-3'-phosphorothioate
  modified_base 23: mod_base = OTHER; note = 2'-O-methyluridine-3'-phosphate ((2S,4R)-1-[29-[[2-(acetylamino)-2-deoxy-beta-D-galactopyra nosyl]oxy]-14,14-bis[[3-[[3-[[5-[[2-(acetylamino)-2-deoxy-b eta-D-galactopyranosyl]oxy]-1-oxopentyl]amino]propyl]amino] -3-oxopropoxy]methyl]-1,12,19,25-tetraoxo-16-oxa-13,20,24-t riazanonacos-1-yl]-4-hydroxy-2-pyrrolidinyl)methyl ester
ttatagagcaagaacactgtttt

SEQ ID NO: 268 - RNA, 21 nt, synthetic construct
  source 1..21: mol_type = other RNA
  modified_base 1: mod_base = OTHER; note = 2'-deoxy-2'-fluoroadenosine-3'-phosphorothioate
  modified_base 2: mod_base = OTHER; note = 2'-O-methyladenosine-3'-phosphorothioate
  modified_base 3: mod_base = OTHER; note = 2'-deoxy-2'-fluorocytidine-3'-phosphate
  modified_base 4: mod_base = OTHER; note = 2'-O-methyladenosine-3'-phosphate
  modified_base 5: mod_base = OTHER; note = 2'-deoxy-2'-fluoroguanosine-3'-phosphate
  modified_base 6: mod_base = OTHER; note = 2'-O-methyluridine-3'-phosphate
  modified_base 7: mod_base = OTHER; note = 2'-deoxy-2'-fluoroguanosine-3'-phosphate
  modified_base 8: mod_base = OTHER; note = 2'-O-methyluridine-3'-phosphate
  modified_base 9: mod_base = OTHER; note = 2'-deoxy-2'-fluorouridine-3'-phosphate
  modified_base 10: mod_base = OTHER; note = 2'-deoxy-2'-fluorocytidine-3'-phosphate
  modified_base 11: mod_base = OTHER; note = 2'-deoxy-2'-fluorouridine-3'-phosphate
  modified_base 12: mod_base = OTHER; note = 2'-O-methyluridine-3'-phosphate
  modified_base 13: mod_base = OTHER; note = 2'-deoxy-2'-fluoroguanosine-3'-phosphate
  modified_base 14: mod_base = OTHER; note = 2'-O-methylcytidine-3'-phosphate
  modified_base 15: mod_base = OTHER; note = 2'-deoxy-2'-fluorouridine-3'-phosphate
  modified_base 16: mod_base = OTHER; note = 2'-O-methylcytidine-3'-phosphate
  modified_base 17: mod_base = OTHER; note = 2'-deoxy-2'-fluorouridine-3'-phosphate
  modified_base 18: mod_base = OTHER; note = 2'-O-methyladenosine-3'-phosphate
  modified_base 19: mod_base = OTHER; note = 2'-deoxy-2'-fluorouridine-3'-phosphate
  modified_base 20: mod_base = OTHER; note = 2'-O-methyladenosine-3'-phosphate
  modified_base 21: mod_base = OTHER; note = 2'-deoxy-2'-fluoroadenosine-3'-phosphate (N-(1-oxo-6-((2S-(4-(2-methylpropyl)phenyl)-propan-1-oyl)am ino)hexyl)-4R-hydroxypyrrolidin-2S-yl)methyl ester
aacagtgttcttgctctataa

SEQ ID NO: 269 - RNA, 23 nt, synthetic construct
  source 1..23: mol_type = other RNA
  modified_base 1: mod_base = OTHER; note = 2'-O-methyluridine-3'-phosphorothioate
  modified_base 2: mod_base = OTHER; note = 2'-deoxy-2'-fluorouridine-3'-phosphorothioate
  modified_base 3: mod_base = OTHER; note = 2'-O-methyladenosine-3'-phosphate
  modified_base 4: mod_base = OTHER; note = 2'-deoxy-2'-fluorouridine-3'-phosphate
  modified_base 5: mod_base = OTHER; note = 2'-O-methyladenosine-3'-phosphate
  modified_base 6: mod_base = OTHER; note = 2'-deoxy-2'-fluoroguanosine-3'-phosphate
  modified_base 7: mod_base = OTHER; note = 2'-O-methyladenosine-3'-phosphate
  modified_base 8: mod_base = OTHER; note = 2'-deoxy-2'-fluoroguanosine-3'-phosphate
  modified_base 9: mod_base = OTHER; note = 2'-O-methylcytidine-3'-phosphate
  modified_base 10: mod_base = OTHER; note = 2'-deoxy-2'-fluoroadenosine-3'-phosphate
  modified_base 11: mod_base = OTHER; note = 2'-O-methyladenosine-3'-phosphate
  modified_base 12: mod_base = OTHER; note = 2'-O-methylguanosine-3'-phosphate
  modified_base 13: mod_base = OTHER; note = 2'-O-methyladenosine-3'-phosphate
  modified_base 14: mod_base = OTHER; note = 2'-deoxy-2'-fluoroadenosine-3'-phosphate
  modified_base 15: mod_base = OTHER; note = 2'-O-methylcytidine-3'-phosphate
  modified_base 16: mod_base = OTHER; note = 2'-deoxy-2'-fluoroadenosine-3'-phosphate
  modified_base 17: mod_base = OTHER; note = 2'-O-methylcytidine-3'-phosphate
  modified_base 18: mod_base = OTHER; note = 2'-deoxy-2'-fluorouridine-3'-phosphate
  modified_base 19: mod_base = OTHER; note = 2'-O-methylguanosine-3'-phosphate
  modified_base 20: mod_base = OTHER; note = 2'-deoxy-2'-fluorouridine-3'-phosphate
  modified_base 21: mod_base = OTHER; note = 2'-O-methyluridine-3'-phosphorothioate
  modified_base 22: mod_base = OTHER; note = 2'-O-methyluridine-3'-phosphorothioate
  modified_base 23: mod_base = OTHER; note = 2'-O-methyluridine-3'-phosphate ((2S,4R)-1-[29-[[2-(acetylamino)-2-deoxy-beta-D-galactopyra nosyl]oxy]-14,14-bis[[3-[[3-[[5-[[2-(acetylamino)-2-deoxy-b eta-D-galactopyranosyl]oxy]-1-oxopentyl]amino]propyl]amino] -3-oxopropoxy]methyl]-1,12,19,25-tetraoxo-16-oxa-13,20,24-t riazanonacos-1-yl]-4-hydroxy-2-pyrrolidinyl)methyl ester
ttatagagcaagaacactgtttt

SEQ ID NO: 270 - RNA, 21 nt, synthetic construct
  source 1..21: mol_type = other RNA
  modified_base 1: mod_base = OTHER; note = 2'-deoxy-2'-fluoroadenosine-3'-phosphorothioate
  modified_base 2: mod_base = OTHER; note = 2'-O-methyladenosine-3'-phosphorothioate
  modified_base 3: mod_base = OTHER; note = 2'-deoxy-2'-fluorocytidine-3'-phosphate
  modified_base 4: mod_base = OTHER; note = 2'-O-methyladenosine-3'-phosphate
  modified_base 5: mod_base = OTHER; note = 2'-deoxy-2'-fluoroguanosine-3'-phosphate
  modified_base 6: mod_base = OTHER; note = 2'-O-methyluridine-3'-phosphate
  modified_base 7: mod_base = OTHER; note = 2'-deoxy-2'-fluoroguanosine-3'-phosphate
  modified_base 8: mod_base = OTHER; note = 2'-O-methyluridine-3'-phosphate
  modified_base 9: mod_base = OTHER; note = 2'-deoxy-2'-fluorouridine-3'-phosphate
  modified_base 10: mod_base = OTHER; note = 2'-deoxy-2'-fluorocytidine-3'-phosphate
  modified_base 11: mod_base = OTHER; note = 2'-deoxy-2'-fluorouridine-3'-phosphate
  modified_base 12: mod_base = OTHER; note = 2'-O-methyluridine-3'-phosphate
  modified_base 13: mod_base = OTHER; note = 2'-deoxy-2'-fluoroguanosine-3'-phosphate
  modified_base 14: mod_base = OTHER; note = 2'-O-methylcytidine-3'-phosphate
  modified_base 15: mod_base = OTHER; note = 2'-deoxy-2'-fluorouridine-3'-phosphate
  modified_base 16: mod_base = OTHER; note = 2'-O-methylcytidine-3'-phosphate
  modified_base 17: mod_base = OTHER; note = 2'-deoxy-2'-fluorouridine-3'-phosphate
  modified_base 18: mod_base = OTHER; note = 2'-O-methyladenosine-3'-phosphate
  modified_base 19: mod_base = OTHER; note = 2'-deoxy-2'-fluorouridine-3'-phosphate
  modified_base 20: mod_base = OTHER; note = 2'-O-methyladenosine-3'-phosphate
  modified_base 21: mod_base = OTHER; note = 2'-deoxy-2'-fluoroadenosine-3'-phosphate (4R-((((4R-(hydroxy)-1-(6-((S)-2-(4-isobutylphenyl)propanam ido)hexanoyl)pyrrolidin-2S-yl)methoxy)hydroxyphosphoryl)oxy )-1-(6-((S)-2-(4-isobutylphenyl)propanamido)hexanoyl)pyrrol idin-2S-yl)methyl ester
aacagtgttcttgctctataa

SEQ ID NO: 271 - RNA, 23 nt, synthetic construct
  source 1..23: mol_type = other RNA
  modified_base 1: mod_base = OTHER; note = 2'-O-methyluridine-3'-phosphorothioate
  modified_base 2: mod_base = OTHER; note = 2'-deoxy-2'-fluorouridine-3'-phosphorothioate
  modified_base 3: mod_base = OTHER; note = 2'-O-methyladenosine-3'-phosphate
  modified_base 4: mod_base = OTHER; note = 2'-deoxy-2'-fluorouridine-3'-phosphate
  modified_base 5: mod_base = OTHER; note = 2'-O-methyladenosine-3'-phosphate
  modified_base 6: mod_base = OTHER; note = 2'-deoxy-2'-fluoroguanosine-3'-phosphate
  modified_base 7: mod_base = OTHER; note = 2'-O-methyladenosine-3'-phosphate
  modified_base 8: mod_base = OTHER; note = 2'-deoxy-2'-fluoroguanosine-3'-phosphate
  modified_base 9: mod_base = OTHER; note = 2'-O-methylcytidine-3'-phosphate
  modified_base 10: mod_base = OTHER; note = 2'-deoxy-2'-fluoroadenosine-3'-phosphate
  modified_base 11: mod_base = OTHER; note = 2'-O-methyladenosine-3'-phosphate
  modified_base 12: mod_base = OTHER; note = 2'-O-methylguanosine-3'-phosphate
  modified_base 13: mod_base = OTHER; note = 2'-O-methyladenosine-3'-phosphate
  modified_base 14: mod_base = OTHER; note = 2'-deoxy-2'-fluoroadenosine-3'-phosphate
  modified_base 15: mod_base = OTHER; note = 2'-O-methylcytidine-3'-phosphate
  modified_base 16: mod_base = OTHER; note = 2'-deoxy-2'-fluoroadenosine-3'-phosphate
  modified_base 17: mod_base = OTHER; note = 2'-O-methylcytidine-3'-phosphate
  modified_base 18: mod_base = OTHER; note = 2'-deoxy-2'-fluorouridine-3'-phosphate
  modified_base 19: mod_base = OTHER; note = 2'-O-methylguanosine-3'-phosphate
  modified_base 20: mod_base = OTHER; note = 2'-deoxy-2'-fluorouridine-3'-phosphate
  modified_base 21: mod_base = OTHER; note = 2'-O-methyluridine-3'-phosphorothioate
  modified_base 22: mod_base = OTHER; note = 2'-O-methyluridine-3'-phosphorothioate
  modified_base 23: mod_base = OTHER; note = 2'-O-methyluridine-3'-phosphate ((2S,4R)-1-[29-[[2-(acetylamino)-2-deoxy-beta-D-galactopyra nosyl]oxy]-14,14-bis[[3-[[3-[[5-[[2-(acetylamino)-2-deoxy-b eta-D-galactopyranosyl]oxy]-1-oxopentyl]amino]propyl]amino] -3-oxopropoxy]methyl]-1,12,19,25-tetraoxo-16-oxa-13,20,24-t riazanonacos-1-yl]-4-hydroxy-2-pyrrolidinyl)methyl ester
ttatagagcaagaacactgtttt

SEQ ID NO: 272 - RNA, 21 nt, synthetic construct
  source 1..21: mol_type = other RNA
  modified_base 1: mod_base = OTHER; note = 2'-deoxy-2'-fluoroadenosine-3'-phosphorothioate
  modified_base 2: mod_base = OTHER; note = 2'-O-methyladenosine-3'-phosphorothioate
  modified_base 3: mod_base = OTHER; note = 2'-deoxy-2'-fluorocytidine-3'-phosphate
  modified_base 4: mod_base = OTHER; note = 2'-O-methyladenosine-3'-phosphate
  modified_base 5: mod_base = OTHER; note = 2'-deoxy-2'-fluoroguanosine-3'-phosphate
  modified_base 6: mod_base = OTHER; note = 2'-O-methyluridine-3'-phosphate
  modified_base 7: mod_base = OTHER; note = 2'-deoxy-2'-fluoroguanosine-3'-phosphate
  modified_base 8: mod_base = OTHER; note = 2'-O-methyluridine-3'-phosphate
  modified_base 9: mod_base = OTHER; note = 2'-deoxy-2'-fluorouridine-3'-phosphate
  modified_base 10: mod_base = OTHER; note = 2'-deoxy-2'-fluorocytidine-3'-phosphate
  modified_base 11: mod_base = OTHER; note = 2'-deoxy-2'-fluorouridine-3'-phosphate
  modified_base 12: mod_base = OTHER; note = 2'-O-methyluridine-3'-phosphate
  modified_base 13: mod_base = OTHER; note = 2'-deoxy-2'-fluoroguanosine-3'-phosphate
  modified_base 14: mod_base = OTHER; note = 2'-O-methylcytidine-3'-phosphate
  modified_base 15: mod_base = OTHER; note = 2'-deoxy-2'-fluorouridine-3'-phosphate
  modified_base 16: mod_base = OTHER; note = 2'-O-methylcytidine-3'-phosphate
  modified_base 17: mod_base = OTHER; note = 2'-deoxy-2'-fluorouridine-3'-phosphate
  modified_base 18: mod_base = OTHER; note = 2'-O-methyladenosine-3'-phosphate
  modified_base 19: mod_base = OTHER; note = 2'-deoxy-2'-fluorouridine-3'-phosphate
  modified_base 20: mod_base = OTHER; note = 2'-O-methyladenosine-3'-phosphate
  modified_base 21: mod_base = OTHER; note = 2'-deoxy-2'-fluoroadenosine-3'-phosphate (4R-((((4R-((((4R-hydroxy-1-(6-((S)-2-(4-isobutylphenyl)pro panamido)hexanoyl)pyrrolidin-2S-yl)methoxy)hydroxyphosphory l)oxy)-1-(6-((S)-2-(4-isobutylphenyl)propanamido)hexanoyl)p yrrolidin-2S-yl)methoxy)hydroxyphosphoryl)oxy)-1-(6-((S)-2- (4-isobutylphenyl)propanamido)hexanoyl)pyrrolidin-2S-yl)met hyl ester
aacagtgttcttgctctataa

SEQ ID NO: 273 - RNA, 23 nt, synthetic construct
  source 1..23: mol_type = other RNA
  modified_base 1: mod_base = OTHER; note = 2'-O-methyluridine-3'-phosphorothioate
  modified_base 2: mod_base = OTHER; note = 2'-deoxy-2'-fluorouridine-3'-phosphorothioate
  modified_base 3: mod_base = OTHER; note = 2'-O-methyladenosine-3'-phosphate
  modified_base 4: mod_base = OTHER; note = 2'-deoxy-2'-fluorouridine-3'-phosphate
  modified_base 5: mod_base = OTHER; note = 2'-O-methyladenosine-3'-phosphate
  modified_base 6: mod_base = OTHER; note = 2'-deoxy-2'-fluoroguanosine-3'-phosphate
  modified_base 7: mod_base = OTHER; note = 2'-O-methyladenosine-3'-phosphate
  modified_base 8: mod_base = OTHER; note = 2'-deoxy-2'-fluoroguanosine-3'-phosphate
  modified_base 9: mod_base = OTHER; note = 2'-O-methylcytidine-3'-phosphate
  modified_base 10: mod_base = OTHER; note = 2'-deoxy-2'-fluoroadenosine-3'-phosphate
  modified_base 11: mod_base = OTHER; note = 2'-O-methyladenosine-3'-phosphate
  modified_base 12: mod_base = OTHER; note = 2'-O-methylguanosine-3'-phosphate
  modified_base 13: mod_base = OTHER; note = 2'-O-methyladenosine-3'-phosphate
  modified_base 14: mod_base = OTHER; note = 2'-deoxy-2'-fluoroadenosine-3'-phosphate
  modified_base 15: mod_base = OTHER; note = 2'-O-methylcytidine-3'-phosphate
  modified_base 16: mod_base = OTHER; note = 2'-deoxy-2'-fluoroadenosine-3'-phosphate
  modified_base 17: mod_base = OTHER; note = 2'-O-methylcytidine-3'-phosphate
  modified_base 18: mod_base = OTHER; note = 2'-deoxy-2'-fluorouridine-3'-phosphate
  modified_base 19: mod_base = OTHER; note = 2'-O-methylguanosine-3'-phosphate
  modified_base 20: mod_base = OTHER; note = 2'-deoxy-2'-fluorouridine-3'-phosphate
  modified_base 21: mod_base = OTHER; note = 2'-O-methyluridine-3'-phosphorothioate
  modified_base 22: mod_base = OTHER; note = 2'-O-methyluridine-3'-phosphorothioate
  modified_base 23: mod_base = OTHER; note = 2'-O-methyluridine-3'-phosphate ((2S,4R)-1-[29-[[2-(acetylamino)-2-deoxy-beta-D-galactopyra nosyl]oxy]-14,14-bis[[3-[[3-[[5-[[2-(acetylamino)-2-deoxy-b eta-D-galactopyranosyl]oxy]-1-oxopentyl]amino]propyl]amino] -3-oxopropoxy]methyl]-1,12,19,25-tetraoxo-16-oxa-13,20,24-t riazanonacos-1-yl]-4-hydroxy-2-pyrrolidinyl)methyl ester
ttatagagcaagaacactgtttt

SEQ ID NO: 274 - RNA, 21 nt, synthetic construct
  source 1..21: mol_type = other RNA
  modified_base 1: mod_base = OTHER; note = 2'-deoxy-2'-fluorouridine-3'-phosphorothioate
  modified_base 2: mod_base = OTHER; note = 2'-O-methyladenosine-3'-phosphorothioate
  modified_base 3: mod_base = OTHER; note = 2'-deoxy-2'-fluorocytidine-3'-phosphate
  modified_base 4: mod_base = OTHER; note = 2'-O-methyluridine-3'-phosphate
  modified_base 5: mod_base = OTHER; note = 2'-deoxy-2'-fluoroguanosine-3'-phosphate
  modified_base 6: mod_base = OTHER; note = 2'-O-methyluridine-3'-phosphate
  modified_base 7: mod_base = OTHER; note = 2'-deoxy-2'-fluorouridine-3'-phosphate
  modified_base 8: mod_base = OTHER; note = 2'-O-methylguanosine-3'-phosphate
  modified_base 9: mod_base = OTHER; note = 2'-deoxy-2'-fluoroguanosine-3'-phosphate
  modified_base 10: mod_base = OTHER; note = 2'-deoxy-2'-fluoroadenosine-3'-phosphate
  modified_base 11: mod_base = OTHER; note = 2'-deoxy-2'-fluorouridine-3'-phosphate
  modified_base 12: mod_base = OTHER; note = 2'-O-methyluridine-3'-phosphate
  modified_base 13: mod_base = OTHER; note = 2'-deoxy-2'-fluoroguanosine-3'-phosphate
  modified_base 14: mod_base = OTHER; note = 2'-O-methyladenosine-3'-phosphate
  modified_base 15: mod_base = OTHER; note = 2'-deoxy-2'-fluorouridine-3'-phosphate
  modified_base 16: mod_base = OTHER; note = 2'-O-methyluridine-3'-phosphate
  modified_base 17: mod_base = OTHER; note = 2'-deoxy-2'-fluorocytidine-3'-phosphate
  modified_base 18: mod_base = OTHER; note = 2'-O-methylguanosine-3'-phosphate
  modified_base 19: mod_base = OTHER; note = 2'-deoxy-2'-fluoroadenosine-3'-phosphate
  modified_base 20: mod_base = OTHER; note = 2'-O-methyladenosine-3'-phosphate
  modified_base 21: mod_base = OTHER; note = 2'-deoxy-2'-fluoroadenosine-3'-phosphate (N-(1-oxo-6-((2S-(4-(2-methylpropyl)phenyl)-propan-1-oyl)am ino)hexyl)-4R-hydroxypyrrolidin-2S-yl)methyl ester
tactgttggattgattcgaaa

SEQ ID NO: 275 - RNA, 23 nt, synthetic construct
  source 1..23: mol_type = other RNA
  modified_base 1: mod_base = OTHER; note = 2'-O-methyluridine-3'-phosphorothioate 5'-(E)-Vinylphosphonate
  modified_base 2: mod_base = OTHER; note = 2'-deoxy-2'-fluorouridine-3'-phosphorothioate
  modified_base 3: mod_base = OTHER; note = 2'-O-methyluridine-3'-phosphate
  modified_base 4: mod_base = OTHER; note = 2'-deoxy-2'-fluorocytidine-3'-phosphate
  modified_base 5: mod_base = OTHER; note = 2'-O-methylguanosine-3'-phosphate
  modified_base 6: mod_base = OTHER; note = 2'-deoxy-2'-fluoroadenosine-3'-phosphate
  modified_base 7: mod_base = OTHER; note = 2'-O-methyladenosine-3'-phosphate
  modified_base 8: mod_base = OTHER; note = 2'-deoxy-2'-fluorouridine-3'-phosphate
  modified_base 9: mod_base = OTHER; note = 2'-O-methylcytidine-3'-phosphate
  modified_base 10: mod_base = OTHER; note = 2'-deoxy-2'-fluoroadenosine-3'-phosphate
  modified_base 11: mod_base = OTHER; note = 2'-O-methyladenosine-3'-phosphate
  modified_base 12: mod_base = OTHER; note = 2'-O-methyluridine-3'-phosphate
  modified_base 13: mod_base = OTHER; note = 2'-O-methylcytidine-3'-phosphate
  modified_base 14: mod_base = OTHER; note = 2'-deoxy-2'-fluorocytidine-3'-phosphate
  modified_base 15: mod_base = OTHER; note = 2'-O-methyladenosine-3'-phosphate
  modified_base 16: mod_base = OTHER; note = 2'-deoxy-2'-fluoroadenosine-3'-phosphate
  modified_base 17: mod_base = OTHER; note = 2'-O-methylcytidine-3'-phosphate
  modified_base 18: mod_base = OTHER; note = 2'-deoxy-2'-fluoroadenosine-3'-phosphate
  modified_base 19: mod_base = OTHER; note = 2'-O-methylguanosine-3'-phosphate
  modified_base 20: mod_base = OTHER; note = 2'-deoxy-2'-fluorouridine-3'-phosphate
  modified_base 21: mod_base = OTHER; note = 2'-O-methyladenosine-3'-phosphorothioate
  modified_base 22: mod_base = OTHER; note = 2'-O-methylguanosine-3'-phosphorothioate
  modified_base 23: mod_base = OTHER; note = 2'-O-methylcytidine
tttcgaatcaatccaacagtagc

SEQ ID NO: 276 - RNA, 21 nt, synthetic construct
  source 1..21: mol_type = other RNA
  modified_base 1: mod_base = OTHER; note = 2'-deoxy-2'-fluorouridine-3'-phosphorothioate
  modified_base 2: mod_base = OTHER; note = 2'-O-methyladenosine-3'-phosphorothioate
  modified_base 3: mod_base = OTHER; note = 2'-deoxy-2'-fluorocytidine-3'-phosphate
  modified_base 4: mod_base = OTHER; note = 2'-O-methyluridine-3'-phosphate
  modified_base 5: mod_base = OTHER; note = 2'-deoxy-2'-fluoroguanosine-3'-phosphate
  modified_base 6: mod_base = OTHER; note = 2'-O-methyluridine-3'-phosphate
  modified_base 7: mod_base = OTHER; note = 2'-deoxy-2'-fluorouridine-3'-phosphate
  modified_base 8: mod_base = OTHER; note = 2'-O-methylguanosine-3'-phosphate
  modified_base 9: mod_base = OTHER; note = 2'-deoxy-2'-fluoroguanosine-3'-phosphate
  modified_base 10: mod_base = OTHER; note = 2'-deoxy-2'-fluoroadenosine-3'-phosphate
  modified_base 11: mod_base = OTHER; note = 2'-deoxy-2'-fluorouridine-3'-phosphate
  modified_base 12: mod_base = OTHER; note = 2'-O-methyluridine-3'-phosphate
  modified_base 13: mod_base = OTHER; note = 2'-deoxy-2'-fluoroguanosine-3'-phosphate
  modified_base 14: mod_base = OTHER; note = 2'-O-methyladenosine-3'-phosphate
  modified_base 15: mod_base = OTHER; note = 2'-deoxy-2'-fluorouridine-3'-phosphate
  modified_base 16: mod_base = OTHER; note = 2'-O-methyluridine-3'-phosphate
  modified_base 17: mod_base = OTHER; note = 2'-deoxy-2'-fluorocytidine-3'-phosphate
  modified_base 18: mod_base = OTHER; note = 2'-O-methylguanosine-3'-phosphate
  modified_base 19: mod_base = OTHER; note = 2'-deoxy-2'-fluoroadenosine-3'-phosphate
  modified_base 20: mod_base = OTHER; note = 2'-O-methyladenosine-3'-phosphate
  modified_base 21: mod_base = OTHER; note = 2'-deoxy-2'-fluoroadenosine-3'-phosphate (4R-((((4R-(hydroxy)-1-(6-((S)-2-(4-isobutylphenyl)propanam ido)hexanoyl)pyrrolidin-2S-yl)methoxy)hydroxyphosphoryl)oxy )-1-(6-((S)-2-(4-isobutylphenyl)propanamido)hexanoyl)pyrrol idin-2S-yl)methyl ester
tactgttggattgattcgaaa

SEQ ID NO: 277 - RNA, 23 nt, synthetic construct
  source 1..23: mol_type = other RNA
  modified_base 1: mod_base = OTHER; note = 2'-O-methyluridine-3'-phosphorothioate 5'-(E)-Vinylphosphonate
  modified_base 2: mod_base = OTHER; note = 2'-deoxy-2'-fluorouridine-3'-phosphorothioate
  modified_base 3: mod_base = OTHER; note = 2'-O-methyluridine-3'-phosphate
  modified_base 4: mod_base = OTHER; note = 2'-deoxy-2'-fluorocytidine-3'-phosphate
  modified_base 5: mod_base = OTHER; note = 2'-O-methylguanosine-3'-phosphate
  modified_base 6: mod_base = OTHER; note = 2'-deoxy-2'-fluoroadenosine-3'-phosphate
  modified_base 7: mod_base = OTHER; note = 2'-O-methyladenosine-3'-phosphate
  modified_base 8: mod_base = OTHER; note = 2'-deoxy-2'-fluorouridine-3'-phosphate
  modified_base 9: mod_base = OTHER; note = 2'-O-methylcytidine-3'-phosphate
  modified_base 10: mod_base = OTHER; note = 2'-deoxy-2'-fluoroadenosine-3'-phosphate
  modified_base 11: mod_base = OTHER; note = 2'-O-methyladenosine-3'-phosphate
  modified_base 12: mod_base = OTHER; note = 2'-O-methyluridine-3'-phosphate
  modified_base 13: mod_base = OTHER; note = 2'-O-methylcytidine-3'-phosphate
  modified_base 14: mod_base = OTHER; note = 2'-deoxy-2'-fluorocytidine-3'-phosphate
  modified_base 15: mod_base = OTHER; note = 2'-O-methyladenosine-3'-phosphate
  modified_base 16: mod_base = OTHER; note = 2'-deoxy-2'-fluoroadenosine-3'-phosphate
  modified_base 17: mod_base = OTHER; note = 2'-O-methylcytidine-3'-phosphate
  modified_base 18: mod_base = OTHER; note = 2'-deoxy-2'-fluoroadenosine-3'-phosphate
  modified_base 19: mod_base = OTHER; note = 2'-O-methylguanosine-3'-phosphate
  modified_base 20: mod_base = OTHER; note = 2'-deoxy-2'-fluorouridine-3'-phosphate
  modified_base 21: mod_base = OTHER; note = 2'-O-methyladenosine-3'-phosphorothioate
  modified_base 22: mod_base = OTHER; note = 2'-O-methylguanosine-3'-phosphorothioate
  modified_base 23: mod_base = OTHER; note = 2'-O-methylcytidine
tttcgaatcaatccaacagtagc

SEQ ID NO: 278 - RNA, 21 nt, synthetic construct
  source 1..21: mol_type = other RNA
  modified_base 1: mod_base = OTHER; note = 2'-deoxy-2'-fluorouridine-3'-phosphorothioate
  modified_base 2: mod_base = OTHER; note = 2'-O-methyladenosine-3'-phosphorothioate
  modified_base 3: mod_base = OTHER; note = 2'-deoxy-2'-fluorocytidine-3'-phosphate
  modified_base 4: mod_base = OTHER; note = 2'-O-methyluridine-3'-phosphate
  modified_base 5: mod_base = OTHER; note = 2'-deoxy-2'-fluoroguanosine-3'-phosphate
  modified_base 6: mod_base = OTHER; note = 2'-O-methyluridine-3'-phosphate
  modified_base 7: mod_base = OTHER; note = 2'-deoxy-2'-fluorouridine-3'-phosphate
  modified_base 8: mod_base = OTHER; note = 2'-O-methylguanosine-3'-phosphate
  modified_base 9: mod_base = OTHER; note = 2'-deoxy-2'-fluoroguanosine-3'-phosphate
  modified_base 10: mod_base = OTHER; note = 2'-deoxy-2'-fluoroadenosine-3'-phosphate
  modified_base 11: mod_base = OTHER; note = 2'-deoxy-2'-fluorouridine-3'-phosphate
  modified_base 12: mod_base = OTHER; note = 2'-O-methyluridine-3'-phosphate
  modified_base 13: mod_base = OTHER; note = 2'-deoxy-2'-fluoroguanosine-3'-phosphate
  modified_base 14: mod_base = OTHER; note = 2'-O-methyladenosine-3'-phosphate
  modified_base 15: mod_base = OTHER; note = 2'-deoxy-2'-fluorouridine-3'-phosphate
  modified_base 16: mod_base = OTHER; note = 2'-O-methyluridine-3'-phosphate
  modified_base 17: mod_base = OTHER; note = 2'-deoxy-2'-fluorocytidine-3'-phosphate
  modified_base 18: mod_base = OTHER; note = 2'-O-methylguanosine-3'-phosphate
  modified_base 19: mod_base = OTHER; note = 2'-deoxy-2'-fluoroadenosine-3'-phosphate
  modified_base 20: mod_base = OTHER; note = 2'-O-methyladenosine-3'-phosphate
  modified_base 21: mod_base = OTHER; note = 2'-deoxy-2'-fluoroadenosine-3'-phosphate (4R-((((4R-((((4R-hydroxy-1-(6-((S)-2-(4-isobutylphenyl)pro panamido)hexanoyl)pyrrolidin-2S-yl)methoxy)hydroxyphosphory l)oxy)-1-(6-((S)-2-(4-isobutylphenyl)propanamido)hexanoyl)p yrrolidin-2S-yl)methoxy)hydroxyphosphoryl)oxy)-1-(6-((S)-2- (4-isobutylphenyl)propanamido)hexanoyl)pyrrolidin-2S-yl)met hyl ester
tactgttggattgattcgaaa

SEQ ID NO: 279 - RNA, 23 nt, synthetic construct
  source 1..23: mol_type = other RNA
  modified_base 1: mod_base = OTHER; note = 2'-O-methyluridine-3'-phosphorothioate 5'-(E)-Vinylphosphonate
  modified_base 2: mod_base = OTHER; note = 2'-deoxy-2'-fluorouridine-3'-phosphorothioate
  modified_base 3: mod_base = OTHER; note = 2'-O-methyluridine-3'-phosphate
  modified_base 4: mod_base = OTHER; note = 2'-deoxy-2'-fluorocytidine-3'-phosphate
  modified_base 5: mod_base = OTHER; note = 2'-O-methylguanosine-3'-phosphate
  modified_base 6: mod_base = OTHER; note = 2'-deoxy-2'-fluoroadenosine-3'-phosphate
  modified_base 7: mod_base = OTHER; note = 2'-O-methyladenosine-3'-phosphate
  modified_base 8: mod_base = OTHER; note = 2'-deoxy-2'-fluorouridine-3'-phosphate
  modified_base 9: mod_base = OTHER; note = 2'-O-methylcytidine-3'-phosphate
  modified_base 10: mod_base = OTHER; note = 2'-deoxy-2'-fluoroadenosine-3'-phosphate
  modified_base 11: mod_base = OTHER; note = 2'-O-methyladenosine-3'-phosphate
  modified_base 12: mod_base = OTHER; note = 2'-O-methyluridine-3'-phosphate
  modified_base 13: mod_base = OTHER; note = 2'-O-methylcytidine-3'-phosphate
  modified_base 14: mod_base = OTHER; note = 2'-deoxy-2'-fluorocytidine-3'-phosphate
  modified_base 15: mod_base = OTHER; note = 2'-O-methyladenosine-3'-phosphate
  modified_base 16: mod_base = OTHER; note = 2'-deoxy-2'-fluoroadenosine-3'-phosphate
  modified_base 17: mod_base = OTHER; note = 2'-O-methylcytidine-3'-phosphate
  modified_base 18: mod_base = OTHER; note = 2'-deoxy-2'-fluoroadenosine-3'-phosphate
  modified_base 19: mod_base = OTHER; note = 2'-O-methylguanosine-3'-phosphate
  modified_base 20: mod_base = OTHER; note = 2'-deoxy-2'-fluorouridine-3'-phosphate
  modified_base 21: mod_base = OTHER; note = 2'-O-methyladenosine-3'-phosphorothioate
  modified_base 22: mod_base = OTHER; note = 2'-O-methylguanosine-3'-phosphorothioate
  modified_base 23: mod_base = OTHER; note = 2'-O-methylcytidine
tttcgaatcaatccaacagtagc

SEQ ID NO: 280 - RNA, 21 nt, synthetic construct
  source 1..21: mol_type = other RNA
  modified_base 1: mod_base = OTHER; note = 2'-deoxy-2'-fluorouridine-3'-phosphorothioate
  modified_base 2: mod_base = OTHER; note = 2'-O-methyladenosine-3'-phosphorothioate
  modified_base 3: mod_base = OTHER; note = 2'-deoxy-2'-fluorocytidine-3'-phosphate
  modified_base 4: mod_base = OTHER; note = 2'-O-methyluridine-3'-phosphate
  modified_base 5: mod_base = OTHER; note = 2'-deoxy-2'-fluoroguanosine-3'-phosphate
  modified_base 6: mod_base = OTHER; note = 2'-O-methyluridine-3'-phosphate
  modified_base 7: mod_base = OTHER; note = 2'-deoxy-2'-fluorouridine-3'-phosphate
  modified_base 8: mod_base = OTHER; note = 2'-O-methylguanosine-3'-phosphate
  modified_base 9: mod_base = OTHER; note = 2'-deoxy-2'-fluoroguanosine-3'-phosphate
  modified_base 10: mod_base = OTHER; note = 2'-deoxy-2'-fluoroadenosine-3'-phosphate
  modified_base 11: mod_base = OTHER; note = 2'-deoxy-2'-fluorouridine-3'-phosphate
  modified_base 12: mod_base = OTHER; note = 2'-O-methyluridine-3'-phosphate
  modified_base 13: mod_base = OTHER; note = 2'-deoxy-2'-fluoroguanosine-3'-phosphate
  modified_base 14: mod_base = OTHER; note = 2'-O-methyladenosine-3'-phosphate
  modified_base 15: mod_base = OTHER; note = 2'-deoxy-2'-fluorouridine-3'-phosphate
  modified_base 16: mod_base = OTHER; note = 2'-O-methyluridine-3'-phosphate
  modified_base 17: mod_base = OTHER; note = 2'-deoxy-2'-fluorocytidine-3'-phosphate
  modified_base 18: mod_base = OTHER; note = 2'-O-methylguanosine-3'-phosphate
  modified_base 19: mod_base = OTHER; note = 2'-deoxy-2'-fluoroadenosine-3'-phosphate
  modified_base 20: mod_base = OTHER; note = 2'-O-methyladenosine-3'-phosphate
  modified_base 21: mod_base = OTHER; note = 2'-deoxy-2'-fluoroadenosine-3'-phosphate (N-(1-oxo-6-((3beta-cholest-5-en-3-yl)oxcarboxamido)hexyl)- 4R-hydroxypyrrolidin-2S-yl)methyl ester
tactgttggattgattcgaaa

SEQ ID NO: 281 - RNA, 23 nt, synthetic construct
  source 1..23: mol_type = other RNA
  modified_base 1: mod_base = OTHER; note = 2'-O-methyluridine-3'-phosphorothioate 5'-(E)-Vinylphosphonate
  modified_base 2: mod_base = OTHER; note = 2'-deoxy-2'-fluorouridine-3'-phosphorothioate
  modified_base 3: mod_base = OTHER; note = 2'-O-methyluridine-3'-phosphate
  modified_base 4: mod_base = OTHER; note = 2'-deoxy-2'-fluorocytidine-3'-phosphate
  modified_base 5: mod_base = OTHER; note = 2'-O-methylguanosine-3'-phosphate
  modified_base 6: mod_base = OTHER; note = 2'-deoxy-2'-fluoroadenosine-3'-phosphate
  modified_base 7: mod_base = OTHER; note = 2'-O-methyladenosine-3'-phosphate
  modified_base 8: mod_base = OTHER; note = 2'-deoxy-2'-fluorouridine-3'-phosphate
  modified_base 9: mod_base = OTHER; note = 2'-O-methylcytidine-3'-phosphate
  modified_base 10: mod_base = OTHER; note = 2'-deoxy-2'-fluoroadenosine-3'-phosphate
  modified_base 11: mod_base = OTHER; note = 2'-O-methyladenosine-3'-phosphate
  modified_base 12: mod_base = OTHER; note = 2'-O-methyluridine-3'-phosphate
  modified_base 13: mod_base = OTHER; note = 2'-O-methylcytidine-3'-phosphate
  modified_base 14: mod_base = OTHER; note = 2'-deoxy-2'-fluorocytidine-3'-phosphate
  modified_base 15: mod_base = OTHER; note = 2'-O-methyladenosine-3'-phosphate
  modified_base 16: mod_base = OTHER; note = 2'-deoxy-2'-fluoroadenosine-3'-phosphate
  modified_base 17: mod_base = OTHER; note = 2'-O-methylcytidine-3'-phosphate
  modified_base 18: mod_base = OTHER; note = 2'-deoxy-2'-fluoroadenosine-3'-phosphate
  modified_base 19: mod_base = OTHER; note = 2'-O-methylguanosine-3'-phosphate
  modified_base 20: mod_base = OTHER; note = 2'-deoxy-2'-fluorouridine-3'-phosphate
  modified_base 21: mod_base = OTHER; note = 2'-O-methyladenosine-3'-phosphorothioate
  modified_base 22: mod_base = OTHER; note = 2'-O-methylguanosine-3'-phosphorothioate
  modified_base 23: mod_base = OTHER; note = 2'-O-methylcytidine
tttcgaatcaatccaacagtagc

SEQ ID NO: 282 - RNA, 23 nt, synthetic construct
  source 1..23: mol_type = other RNA
  modified_base 1: mod_base = OTHER; note = 2'-O-methyluridine-3'-phosphorothioate
  modified_base 2: mod_base = OTHER; note = 2'-deoxy-2'-fluorouridine-3'-phosphorothioate
  modified_base 3: mod_base = OTHER; note = 2'-O-methyladenosine-3'-phosphate
  modified_base 4: mod_base = OTHER; note = 2'-deoxy-2'-fluorouridine-3'-phosphate
  modified_base 5: mod_base = OTHER; note = 2'-O-methyladenosine-3'-phosphate
  modified_base 6: mod_base = OTHER; note = 2'-deoxy-2'-fluoroguanosine-3'-phosphate
  modified_base 7: mod_base = OTHER; note = 2'-O-methyladenosine-3'-phosphate
  modified_base 8: mod_base = OTHER; note = 2'-deoxy-2'-fluoroguanosine-3'-phosphate
  modified_base 9: mod_base = OTHER; note = 2'-O-methylcytidine-3'-phosphate
  modified_base 10: mod_base = OTHER; note = 2'-deoxy-2'-fluoroadenosine-3'-phosphate
  modified_base 11: mod_base = OTHER; note = 2'-O-methyladenosine-3'-phosphate
  modified_base 12: mod_base = OTHER; note = 2'-O-methylguanosine-3'-phosphate
  modified_base 13: mod_base = OTHER; note = 2'-O-methyladenosine-3'-phosphate
  modified_base 14: mod_base = OTHER; note = 2'-deoxy-2'-fluoroadenosine-3'-phosphate
  modified_base 15: mod_base = OTHER; note = 2'-O-methylcytidine-3'-phosphate
  modified_base 16: mod_base = OTHER; note = 2'-deoxy-2'-fluoroadenosine-3'-phosphate
  modified_base 17: mod_base = OTHER; note = 2'-O-methylcytidine-3'-phosphate
  modified_base 18: mod_base = OTHER; note = 2'-deoxy-2'-fluorouridine-3'-phosphate
  modified_base 19: mod_base = OTHER; note = 2'-O-methylguanosine-3'-phosphate
  modified_base 20: mod_base = OTHER; note = 2'-deoxy-2'-fluorouridine-3'-phosphate
  modified_base 21: mod_base = OTHER; note = 2'-O-methyluridine-3'-phosphorothioate
  modified_base 22: mod_base = OTHER; note = 2'-O-methyluridine-3'-phosphorothioate
  modified_base 23: mod_base = OTHER; note = 2'-O-methyluridine-3'-phosphate ((2S,4R)-1-[29-[[2-(acetylamino)-2-deoxy-beta-D-galactopyra nosyl]oxy]-14,14-bis[[3-[[3-[[5-[[2-(acetylamino)-2-deoxy-b eta-D-galactopyranosyl]oxy]-1-oxopentyl]amino]propyl]amino] -3-oxopropoxy]methyl]-1,12,19,25-tetraoxo-16-oxa-13,20,24-t riazanonacos-1-yl]-4-hydroxy-2-pyrrolidinyl)methyl ester
ttatagagcaagaacactgtttt

SEQ ID NO: 283 - RNA, 22 nt, synthetic construct
  source 1..22: mol_type = other RNA
  modified_base 1: mod_base = OTHER; note = 2'-O-methyluridine-3'-phosphorothioate
  modified_base 2: mod_base = OTHER; note = 2'-deoxy-2'-fluorouridine-3'-phosphorothioate
  modified_base 3: mod_base = OTHER; note = 2'-O-methyladenosine-3'-phosphate
  modified_base 4: mod_base = OTHER; note = 2'-deoxy-2'-fluorouridine-3'-phosphate
  modified_base 5: mod_base = OTHER; note = 2'-O-methyladenosine-3'-phosphate
  modified_base 6: mod_base = OTHER; note = 2'-deoxy-2'-fluoroguanosine-3'-phosphate
  modified_base 7: mod_base = OTHER; note = 2'-O-methyladenosine-3'-phosphate
  modified_base 8: mod_base = OTHER; note = 2'-deoxy-2'-fluoroguanosine-3'-phosphate
  modified_base 9: mod_base = OTHER; note = 2'-O-methylcytidine-3'-phosphate
  modified_base 10: mod_base = OTHER; note = 2'-deoxy-2'-fluoroadenosine-3'-phosphate
  modified_base 11: mod_base = OTHER; note = 2'-O-methyladenosine-3'-phosphate
  modified_base 12: mod_base = OTHER; note = 2'-O-methylguanosine-3'-phosphate
  modified_base 13: mod_base = OTHER; note = 2'-O-methyladenosine-3'-phosphate
  modified_base 14: mod_base = OTHER; note = 2'-deoxy-2'-fluoroadenosine-3'-phosphate
  modified_base 15: mod_base = OTHER; note = 2'-O-methylcytidine-3'-phosphate
  modified_base 16: mod_base = OTHER; note = 2'-deoxy-2'-fluoroadenosine-3'-phosphate
  modified_base 17: mod_base = OTHER; note = 2'-O-methylcytidine-3'-phosphate
  modified_base 18: mod_base = OTHER; note = 2'-deoxy-2'-fluorouridine-3'-phosphate
  modified_base 19: mod_base = OTHER; note = 2'-O-methylguanosine-3'-phosphate
  modified_base 20: mod_base = OTHER; note = 2'-deoxy-2'-fluorouridine-3'-phosphorothioate
  modified_base 21: mod_base = OTHER; note = 2'-O-methyluridine-3'-phosphorothioate
  modified_base 22: mod_base = OTHER; note = 2'-O-methyluridine-3'-phosphate ((2S,4R)-1-[29-[[2-(acetylamino)-2-deoxy-beta-D-galactopyra nosyl]oxy]-14,14-bis[[3-[[3-[[5-[[2-(acetylamino)-2-deoxy-b eta-D-galactopyranosyl]oxy]-1-oxopentyl]amino]propyl]amino] -3-oxopropoxy]methyl]-1,12,19,25-tetraoxo-16-oxa-13,20,24-t riazanonacos-1-yl]-4-hydroxy-2-pyrrolidinyl)methyl ester
ttatagagcaagaacactgttt

SEQ ID NO: 284 - RNA, 22 nt, synthetic construct
  source 1..22: mol_type = other RNA
  modified_base 1: mod_base = OTHER; note = 2'-O-methyluridine-3'-phosphorothioate
  modified_base 2: mod_base = OTHER; note = 2'-deoxy-2'-fluorouridine-3'-phosphorothioate
  modified_base 3: mod_base = OTHER; note = 2'-O-methyladenosine-3'-phosphate
  modified_base 4: mod_base = OTHER; note = 2'-O-methyluridine-3'-phosphate
  modified_base 5: mod_base = OTHER; note = 2'-O-methyladenosine-3'-phosphate
  modified_base 6: mod_base = OTHER; note = 2'-deoxy-2'-fluoroguanosine-3'-phosphate
  modified_base 7: mod_base = OTHER; note = 2'-O-methyladenosine-3'-phosphate
  modified_base 8: mod_base = OTHER; note = 2'-O-methylguanosine-3'-phosphate
  modified_base 9: mod_base = OTHER; note = 2'-O-methylcytidine-3'-phosphate
  modified_base 10: mod_base = OTHER; note = 2'-O-methyladenosine-3'-phosphate
  modified_base 11: mod_base = OTHER; note = 2'-O-methyladenosine-3'-phosphate
  modified_base 12: mod_base = OTHER; note = 2'-O-methylguanosine-3'-phosphate
  modified_base 13: mod_base = OTHER; note = 2'-O-methyladenosine-3'-phosphate
  modified_base 14: mod_base = OTHER; note = 2'-deoxy-2'-fluoroadenosine-3'-phosphate
  modified_base 15: mod_base = OTHER; note = 2'-O-methylcytidine-3'-phosphate
  modified_base 16: mod_base = OTHER; note = 2'-deoxy-2'-fluoroadenosine-3'-phosphate
  modified_base 17: mod_base = OTHER; note = 2'-O-methylcytidine-3'-phosphate
  modified_base 18: mod_base = OTHER; note = 2'-O-methyluridine-3'-phosphate
  modified_base 19: mod_base = OTHER; note = 2'-O-methylguanosine-3'-phosphate
  modified_base 20: mod_base = OTHER; note = 2'-O-methyluridine-3'-phosphorothioate
  modified_base 21: mod_base = OTHER; note = 2'-O-methyluridine-3'-phosphorothioate
  modified_base 22: mod_base = OTHER; note = 2'-O-methyluridine-3'-phosphate ((2S,4R)-1-[29-[[2-(acetylamino)-2-deoxy-beta-D-galactopyra nosyl]oxy]-14,14-bis[[3-[[3-[[5-[[2-(acetylamino)-2-deoxy-b eta-D-galactopyranosyl]oxy]-1-oxopentyl]amino]propyl]amino] -3-oxopropoxy]methyl]-1,12,19,25-tetraoxo-16-oxa-13,20,24-t riazanonacos-1-yl]-4-hydroxy-2-pyrrolidinyl)methyl ester
ttatagagcaagaacactgttt

SEQ ID NO: 285 - RNA, 21 nt, synthetic construct
  source 1..21: mol_type = other RNA
  modified_base 1: mod_base = OTHER; note = 2'-O-methyladenosine-3'-phosphorothioate
  modified_base 2: mod_base = OTHER; note = 2'-O-methyladenosine-3'-phosphorothioate
  modified_base 3: mod_base = OTHER; note = 2'-deoxy-2'-fluorocytidine-3'-phosphate
  modified_base 4: mod_base = OTHER; note = 2'-O-methyladenosine-3'-phosphate
  modified_base 5: mod_base = OTHER; note = 2'-deoxy-2'-fluoroguanosine-3'-phosphate
  modified_base 6: mod_base = OTHER; note = 2'-O-methyluridine-3'-phosphate
  modified_base 7: mod_base = OTHER; note = 2'-deoxy-2'-fluoroguanosine-3'-phosphate
  modified_base 8: mod_base = OTHER; note = 2'-O-methyluridine-3'-phosphate
  modified_base 9: mod_base = OTHER; note = 2'-deoxy-2'-fluorouridine-3'-phosphate
  modified_base 10: mod_base = OTHER; note = 2'-deoxy-2'-fluorocytidine-3'-phosphate
  modified_base 11: mod_base = OTHER; note = 2'-deoxy-2'-fluorouridine-3'-phosphate
  modified_base 12: mod_base = OTHER; note = 2'-O-methyluridine-3'-phosphate
  modified_base 13: mod_base = OTHER; note = 2'-deoxy-2'-fluoroguanosine-3'-phosphate
  modified_base 14: mod_base = OTHER; note = 2'-O-methylcytidine-3'-phosphate
  modified_base 15: mod_base = OTHER; note = 2'-deoxy-2'-fluorouridine-3'-phosphate
  modified_base 16: mod_base = OTHER; note = 2'-O-methylcytidine-3'-phosphate
  modified_base 17: mod_base = OTHER; note = 2'-deoxy-2'-fluorouridine-3'-phosphate
  modified_base 18: mod_base = OTHER; note = 2'-O-methyladenosine-3'-phosphate
  modified_base 19: mod_base = OTHER; note = 2'-deoxy-2'-fluorouridine-3'-phosphorothioate
  modified_base 20: mod_base = OTHER; note = 2'-O-methyladenosine-3'-phosphorothioate
  modified_base 21: mod_base = OTHER; note = 2'-deoxy-2'-fluoroadenosine
aacagtgttcttgctctataa

SEQ ID NO: 286 - RNA, 21 nt, synthetic construct
  source 1..21: mol_type = other RNA
  modified_base 1: mod_base = OTHER; note = 2'-O-methyladenosine-3'-phosphorothioate
  modified_base 2: mod_base = OTHER; note = 2'-O-methyladenosine-3'-phosphorothioate
  modified_base 3: mod_base = OTHER; note = 2'-deoxy-2'-fluorocytidine-3'-phosphate
  modified_base 4: mod_base = OTHER; note = 2'-O-methyladenosine-3'-phosphate
  modified_base 5: mod_base = OTHER; note = 2'-deoxy-2'-fluoroguanosine-3'-phosphate
  modified_base 6: mod_base = OTHER; note = 2'-O-methyluridine-3'-phosphate
  modified_base 7: mod_base = OTHER; note = 2'-deoxy-2'-fluoroguanosine-3'-phosphate
  modified_base 8: mod_base = OTHER; note = 2'-O-methyluridine-3'-phosphate
  modified_base 9: mod_base = OTHER; note = 2'-deoxy-2'-fluorouridine-3'-phosphate
  modified_base 10: mod_base = OTHER; note = 2'-deoxy-2'-fluorocytidine-3'-phosphate
  modified_base 11: mod_base = OTHER; note = 2'-deoxy-2'-fluorouridine-3'-phosphate
  modified_base 12: mod_base = OTHER; note = 2'-O-methyluridine-3'-phosphate
  modified_base 13: mod_base = OTHER; note = 2'-deoxy-2'-fluoroguanosine-3'-phosphate
  modified_base 14: mod_base = OTHER; note = 2'-O-methylcytidine-3'-phosphate
  modified_base 15: mod_base = OTHER; note = 2'-deoxy-2'-fluorouridine-3'-phosphate
  modified_base 16: mod_base = OTHER; note = 2'-O-methylcytidine-3'-phosphate
  modified_base 17: mod_base = OTHER; note = 2'-deoxy-2'-fluorouridine-3'-phosphate
  modified_base 18: mod_base = OTHER; note = 2'-O-methyladenosine-3'-phosphate
  modified_base 19: mod_base = OTHER; note = 2'-deoxy-2'-fluorouridine-3'-phosphorothioate
  modified_base 20: mod_base = OTHER; note = 2'-O-methyladenosine-3'-phosphorothioate
  modified_base 21: mod_base = OTHER; note = 2'-deoxy-2'-fluoroadenosine-3'-phosphate (4R-((((4R-(hydroxy)-1-(6-((S)-2-(4-isobutylphenyl)propanam ido)hexanoyl)pyrrolidin-2S-yl)methoxy)hydroxyphosphoryl)oxy )-1-(6-((S)-2-(4-isobutylphenyl)propanamido)hexanoyl)pyrrol idin-2S-yl)methyl ester
aacagtgttcttgctctataa

SEQ ID NO: 287 - RNA, 21 nt, synthetic construct
  source 1..21: mol_type = other RNA
  modified_base 1: mod_base = OTHER; note = 2'-O-methyladenosine-3'-phosphorothioate
  modified_base 2: mod_base = OTHER; note = 2'-O-methyladenosine-3'-phosphorothioate
  modified_base 3: mod_base = OTHER; note = 2'-deoxy-2'-fluorocytidine-3'-phosphate
  modified_base 4: mod_base = OTHER; note = 2'-O-methyladenosine-3'-phosphate
  modified_base 5: mod_base = OTHER; note = 2'-deoxy-2'-fluoroguanosine-3'-phosphate
  modified_base 6: mod_base = OTHER; note = 2'-O-methyluridine-3'-phosphate
  modified_base 7: mod_base = OTHER; note = 2'-deoxy-2'-fluoroguanosine-3'-phosphate
  modified_base 8: mod_base = OTHER; note = 2'-O-methyluridine-3'-phosphate
  modified_base 9: mod_base = OTHER; note = 2'-deoxy-2'-fluorouridine-3'-phosphate
  modified_base 10: mod_base = OTHER; note = 2'-deoxy-2'-fluorocytidine-3'-phosphate
  modified_base 11: mod_base = OTHER; note = 2'-deoxy-2'-fluorouridine-3'-phosphate
  modified_base 12: mod_base = OTHER; note = 2'-O-methyluridine-3'-phosphate
  modified_base 13: mod_base = OTHER; note = 2'-deoxy-2'-fluoroguanosine-3'-phosphate
  modified_base 14: mod_base = OTHER; note = 2'-O-methylcytidine-3'-phosphate
  modified_base 15: mod_base = OTHER; note = 2'-deoxy-2'-fluorouridine-3'-phosphate
  modified_base 16: mod_base = OTHER; note = 2'-O-methylcytidine-3'-phosphate
  modified_base 17: mod_base = OTHER; note = 2'-deoxy-2'-fluorouridine-3'-phosphate
  modified_base 18: mod_base = OTHER; note = 2'-O-methyladenosine-3'-phosphate
  modified_base 19: mod_base = OTHER; note = 2'-deoxy-2'-fluorouridine-3'-phosphorothioate
  modified_base 20: mod_base = OTHER; note = 2'-O-methyladenosine-3'-phosphorothioate
  modified_base 21: mod_base = OTHER; note = 2'-deoxy-2'-fluoroadenosine-3'-phosphate (N-(1-oxo-6-((3beta-cholest-5-en-3-yl)oxcarboxamido)hexyl)- 4R-hydroxypyrrolidin-2S-yl)methyl ester
aacagtgttcttgctctataa

SEQ ID NO: 288 - RNA, 21 nt, synthetic construct
  source 1..21: mol_type = other RNA
  modified_base 1: mod_base = OTHER; note = 2'-O-methyladenosine-3'-phosphorothioate
  modified_base 2: mod_base = OTHER; note = 2'-O-methyladenosine-3'-phosphorothioate
  modified_base 3: mod_base = OTHER; note = 2'-deoxy-2'-fluorocytidine-3'-phosphate
  modified_base 4: mod_base = OTHER; note = 2'-O-methyladenosine-3'-phosphate
  modified_base 5: mod_base = OTHER; note = 2'-deoxy-2'-fluoroguanosine-3'-phosphate
  modified_base 6: mod_base = OTHER; note = 2'-O-methyluridine-3'-phosphate
  modified_base 7: mod_base = OTHER; note = 2'-deoxy-2'-fluoroguanosine-3'-phosphate
  modified_base 8: mod_base = OTHER; note = 2'-O-methyluridine-3'-phosphate
  modified_base 9: mod_base = OTHER; note = 2'-deoxy-2'-fluorouridine-3'-phosphate
  modified_base 10: mod_base = OTHER; note = 2'-deoxy-2'-fluorocytidine-3'-phosphate
  modified_base 11: mod_base = OTHER; note = 2'-deoxy-2'-fluorouridine-3'-phosphate
  modified_base 12: mod_base = OTHER; note = 2'-O-methyluridine-3'-phosphate
  modified_base 13: mod_base = OTHER; note = 2'-deoxy-2'-fluoroguanosine-3'-phosphate
  modified_base 14: mod_base = OTHER; note = 2'-O-methylcytidine-3'-phosphate
  modified_base 15: mod_base = OTHER; note = 2'-deoxy-2'-fluorouridine-3'-phosphate
  modified_base 16: mod_base = OTHER; note = 2'-O-methylcytidine-3'-phosphate
  modified_base 17: mod_base = OTHER; note = 2'-deoxy-2'-fluorouridine-3'-phosphate
  modified_base 18: mod_base = OTHER; note = 2'-O-methyladenosine-3'-phosphate
  modified_base 19: mod_base = OTHER; note = 2'-deoxy-2'-fluorouridine-3'-phosphorothioate
  modified_base 20: mod_base = OTHER; note = 2'-O-methyladenosine-3'-phosphorothioate
  modified_base 21: mod_base = OTHER; note = 2'-deoxy-2'-fluoroadenosine
aacagtgttcttgctctataa

SEQ ID NO: 289 - RNA, 21 nt, synthetic construct
  source 1..21: mol_type = other RNA
  modified_base 1: mod_base = OTHER; note = 2'-O-methyladenosine-3'-phosphorothioate
  modified_base 2: mod_base = OTHER; note = 2'-O-methyladenosine-3'-phosphorothioate
  modified_base 3: mod_base = OTHER; note = 2'-deoxy-2'-fluorocytidine-3'-phosphate
  modified_base 4: mod_base = OTHER; note = 2'-O-methyladenosine-3'-phosphate
  modified_base 5: mod_base = OTHER; note = 2'-deoxy-2'-fluoroguanosine-3'-phosphate
  modified_base 6: mod_base = OTHER; note = 2'-O-methyluridine-3'-phosphate
  modified_base 7: mod_base = OTHER; note = 2'-deoxy-2'-fluoroguanosine-3'-phosphate
  modified_base 8: mod_base = OTHER; note = 2'-O-methyluridine-3'-phosphate
  modified_base 9: mod_base = OTHER; note = 2'-deoxy-2'-fluorouridine-3'-phosphate
  modified_base 10: mod_base = OTHER; note = 2'-deoxy-2'-fluorocytidine-3'-phosphate
  modified_base 11: mod_base = OTHER; note = 2'-deoxy-2'-fluorouridine-3'-phosphate
  modified_base 12: mod_base = OTHER; note = 2'-O-methyluridine-3'-phosphate
  modified_base 13: mod_base = OTHER; note = 2'-deoxy-2'-fluoroguanosine-3'-phosphate
  modified_base 14: mod_base = OTHER; note = 2'-O-methylcytidine-3'-phosphate
  modified_base 15: mod_base = OTHER; note = 2'-deoxy-2'-fluorouridine-3'-phosphate
  modified_base 16: mod_base = OTHER; note = 2'-O-methylcytidine-3'-phosphate
  modified_base 17: mod_base = OTHER; note = 2'-deoxy-2'-fluorouridine-3'-phosphate
  modified_base 18: mod_base = OTHER; note = 2'-O-methyladenosine-3'-phosphate
  modified_base 19: mod_base = OTHER; note = 2'-deoxy-2'-fluorouridine-3'-phosphorothioate
  modified_base 20: mod_base = OTHER; note = 2'-O-methyladenosine-3'-phosphorothioate
  modified_base 21: mod_base = OTHER; note = 2'-deoxy-2'-fluoroadenosine-3'-phosphate (4R-((((4R-(hydroxy)-1-(6-((S)-2-(4-isobutylphenyl)propanam ido)hexanoyl)pyrrolidin-2S-yl)methoxy)hydroxyphosphoryl)oxy )-1-(6-((S)-2-(4-isobutylphenyl)propanamido)hexanoyl)pyrrol idin-2S-yl)methyl ester
aacagtgttcttgctctataa

SEQ ID NO: 290 - RNA, 21 nt, synthetic construct
  source 1..21: mol_type = other RNA
  modified_base 1: mod_base = OTHER; note = 2'-O-methyladenosine-3'-phosphorothioate
  modified_base 2: mod_base = OTHER; note = 2'-O-methyladenosine-3'-phosphorothioate
  modified_base 3: mod_base = OTHER; note = 2'-deoxy-2'-fluorocytidine-3'-phosphate
  modified_base 4: mod_base = OTHER; note = 2'-O-methyladenosine-3'-phosphate
  modified_base 5: mod_base = OTHER; note = 2'-deoxy-2'-fluoroguanosine-3'-phosphate
  modified_base 6: mod_base = OTHER; note = 2'-O-methyluridine-3'-phosphate
  modified_base 7: mod_base = OTHER; note = 2'-deoxy-2'-fluoroguanosine-3'-phosphate
  modified_base 8: mod_base = OTHER; note = 2'-O-methyluridine-3'-phosphate
  modified_base 9: mod_base = OTHER; note = 2'-deoxy-2'-fluorouridine-3'-phosphate
  modified_base 10: mod_base = OTHER; note = 2'-deoxy-2'-fluorocytidine-3'-phosphate
  modified_base 11: mod_base = OTHER; note = 2'-deoxy-2'-fluorouridine-3'-phosphate
  modified_base 12: mod_base = OTHER; note = 2'-O-methyluridine-3'-phosphate
  modified_base 13: mod_base = OTHER; note = 2'-deoxy-2'-fluoroguanosine-3'-phosphate
  modified_base 14: mod_base = OTHER; note = 2'-O-methylcytidine-3'-phosphate
  modified_base 15: mod_base = OTHER; note = 2'-deoxy-2'-fluorouridine-3'-phosphate
  modified_base 16: mod_base = OTHER; note = 2'-O-methylcytidine-3'-phosphate
  modified_base 17: mod_base = OTHER; note = 2'-deoxy-2'-fluorouridine-3'-phosphate
  modified_base 18: mod_base = OTHER; note = 2'-O-methyladenosine-3'-phosphate
  modified_base 19: mod_base = OTHER; note = 2'-deoxy-2'-fluorouridine-3'-phosphorothioate
  modified_base 20: mod_base = OTHER; note = 2'-O-methyladenosine-3'-phosphorothioate
  modified_base 21: mod_base = OTHER; note = 2'-deoxy-2'-fluoroadenosine-3'-phosphate (N-(1-oxo-6-((3beta-cholest-5-en-3-yl)oxcarboxamido)hexyl)- 4R-hydroxypyrrolidin-2S-yl)methyl ester
aacagtgttcttgctctataa

SEQ ID NO: 291 - RNA, 21 nt, synthetic construct
  source 1..21: mol_type = other RNA
  modified_base 1: mod_base = OTHER; note = 2'-O-methyladenosine-3'-phosphorothioate
  modified_base 2: mod_base = OTHER; note = 2'-O-methyladenosine-3'-phosphorothioate
  modified_base 3: mod_base = OTHER; note = 2'-O-methylcytidine-3'-phosphate
  modified_base 4: mod_base = OTHER; note = 2'-O-methyladenosine-3'-phosphate
  modified_base 5: mod_base = OTHER; note = 2'-O-methylguanosine-3'-phosphate
  modified_base 6: mod_base = OTHER; note = 2'-O-methyluridine-3'-phosphate
  modified_base 7: mod_base = OTHER; note = 2'-deoxy-2'-fluoroguanosine-3'-phosphate
  modified_base 8: mod_base = OTHER; note = 2'-O-methyluridine-3'-phosphate
  modified_base 9: mod_base = OTHER; note = 2'-deoxy-2'-fluorouridine-3'-phosphate
  modified_base 10: mod_base = OTHER; note = 2'-deoxy-2'-fluorocytidine-3'-phosphate
  modified_base 11: mod_base = OTHER; note = 2'-deoxy-2'-fluorouridine-3'-phosphate
  modified_base 12: mod_base = OTHER; note = 2'-O-methyluridine-3'-phosphate
  modified_base 13: mod_base = OTHER; note = 2'-deoxy-2'-fluoroguanosine-3'-phosphate
  modified_base 14: mod_base = OTHER; note = 2'-O-methylcytidine-3'-phosphate
  modified_base 15: mod_base = OTHER; note = 2'-O-methyluridine-3'-phosphate
  modified_base 16: mod_base = OTHER; note = 2'-O-methylcytidine-3'-phosphate
  modified_base 17: mod_base = OTHER; note = 2'-O-methyluridine-3'-phosphate
  modified_base 18: mod_base = OTHER; note = 2'-O-methyladenosine-3'-phosphate
  modified_base 19: mod_base = OTHER; note = 2'-O-methyluridine-3'-phosphorothioate
  modified_base 20: mod_base = OTHER; note = 2'-O-methyladenosine-3'-phosphorothioate
  modified_base 21: mod_base = OTHER; note = 2'-O-methyladenosine
aacagtgttcttgctctataa

SEQ ID NO: 292 - RNA, 21 nt, synthetic construct
  source 1..21: mol_type = other RNA
  modified_base 1: mod_base = OTHER; note = 2'-O-methyladenosine-3'-phosphorothioate
  modified_base 2: mod_base = OTHER; note = 2'-O-methyladenosine-3'-phosphorothioate
  modified_base 3: mod_base = OTHER; note = 2'-O-methylcytidine-3'-phosphate
  modified_base 4: mod_base = OTHER; note = 2'-O-methyladenosine-3'-phosphate
  modified_base 5: mod_base = OTHER; note = 2'-O-methylguanosine-3'-phosphate
  modified_base 6: mod_base = OTHER; note = 2'-O-methyluridine-3'-phosphate
  modified_base 7: mod_base = OTHER; note = 2'-deoxy-2'-fluoroguanosine-3'-phosphate
  modified_base 8: mod_base = OTHER; note = 2'-O-methyluridine-3'-phosphate
  modified_base 9: mod_base = OTHER; note = 2'-deoxy-2'-fluorouridine-3'-phosphate
  modified_base 10: mod_base = OTHER; note = 2'-deoxy-2'-fluorocytidine-3'-phosphate
  modified_base 11: mod_base = OTHER; note = 2'-deoxy-2'-fluorouridine-3'-phosphate
  modified_base 12: mod_base = OTHER; note = 2'-O-methyluridine-3'-phosphate
  modified_base 13: mod_base = OTHER; note = 2'-deoxy-2'-fluoroguanosine-3'-phosphate
  modified_base 14: mod_base = OTHER; note = 2'-O-methylcytidine-3'-phosphate
  modified_base 15: mod_base = OTHER; note = 2'-O-methyluridine-3'-phosphate
  modified_base 16: mod_base = OTHER; note = 2'-O-methylcytidine-3'-phosphate
  modified_base 17: mod_base = OTHER; note = 2'-O-methyluridine-3'-phosphate
  modified_base 18: mod_base = OTHER; note = 2'-O-methyladenosine-3'-phosphate
  modified_base 19: mod_base = OTHER; note = 2'-O-methyluridine-3'-phosphorothioate
  modified_base 20: mod_base = OTHER; note = 2'-O-methyladenosine-3'-phosphorothioate
  modified_base 21: mod_base = OTHER; note = 2'-O-methyladenosine-3'-phosphate (4R-((((4R-(hydroxy)-1-(6-((S)-2-(4-isobutylphenyl)propanam ido)hexanoyl)pyrrolidin-2S-yl)methoxy)hydroxyphosphoryl)oxy )-1-(6-((S)-2-(4-isobutylphenyl)propanamido)hexanoyl)pyrrol idin-2S-yl)methyl ester
aacagtgttcttgctctataa

SEQ ID NO: 293 - RNA, 21 nt, synthetic construct
  source 1..21: mol_type = other RNA
  modified_base 1: mod_base = OTHER; note = 2'-O-methyladenosine-3'-phosphorothioate
  modified_base 2: mod_base = OTHER; note = 2'-O-methyladenosine-3'-phosphorothioate
  modified_base 3: mod_base = OTHER; note = 2'-O-methylcytidine-3'-phosphate
  modified_base 4: mod_base = OTHER; note = 2'-O-methyladenosine-3'-phosphate
  modified_base 5: mod_base = OTHER; note = 2'-O-methylguanosine-3'-phosphate
  modified_base 6: mod_base = OTHER; note = 2'-O-methyluridine-3'-phosphate
  modified_base 7: mod_base = OTHER; note = 2'-deoxy-2'-fluoroguanosine-3'-phosphate
  modified_base 8: mod_base = OTHER; note = 2'-O-methyluridine-3'-phosphate
  modified_base 9: mod_base = OTHER; note = 2'-deoxy-2'-fluorouridine-3'-phosphate
  modified_base 10: mod_base = OTHER; note = 2'-deoxy-2'-fluorocytidine-3'-phosphate
  modified_base 11: mod_base = OTHER; note = 2'-deoxy-2'-fluorouridine-3'-phosphate
  modified_base 12: mod_base = OTHER; note = 2'-O-methyluridine-3'-phosphate
  modified_base 13: mod_base = OTHER; note = 2'-deoxy-2'-fluoroguanosine-3'-phosphate
  modified_base 14: mod_base = OTHER; note = 2'-O-methylcytidine-3'-phosphate
  modified_base 15: mod_base = OTHER; note = 2'-O-methyluridine-3'-phosphate
  modified_base 16: mod_base = OTHER; note = 2'-O-methylcytidine-3'-phosphate
  modified_base 17: mod_base = OTHER; note = 2'-O-methyluridine-3'-phosphate
  modified_base 18: mod_base = OTHER; note = 2'-O-methyladenosine-3'-phosphate
  modified_base 19: mod_base = OTHER; note = 2'-O-methyluridine-3'-phosphorothioate
  modified_base 20: mod_base = OTHER; note = 2'-O-methyladenosine-3'-phosphorothioate
  modified_base 21: mod_base = OTHER; note = 2'-O-methyladenosine-3'-phosphate (N-(1-oxo-6-((3beta-cholest-5-en-3-yl)oxcarboxamido)hexyl)- 4R-hydroxypyrrolidin-2S-yl)methyl ester
aacagtgttcttgctctataa

SEQ ID NO: 294 - RNA, 21 nt, synthetic construct
  source 1..21: mol_type = other RNA
  modified_base 1: mod_base = OTHER; note = 2'-O-methyladenosine-3'-phosphorothioate
  modified_base 2: mod_base = OTHER; note = 2'-O-methyladenosine-3'-phosphorothioate
  modified_base 3: mod_base = OTHER; note = 2'-deoxy-2'-fluorocytidine-3'-phosphate
  modified_base 4: mod_base = OTHER; note = 2'-O-methyladenosine-3'-phosphate
  modified_base 5: mod_base = OTHER; note = 2'-deoxy-2'-fluoroguanosine-3'-phosphate
  modified_base 6: mod_base = OTHER; note = 2'-O-methyluridine-3'-phosphate
  modified_base 7: mod_base = OTHER; note = 2'-deoxy-2'-fluoroguanosine-3'-phosphate
  modified_base 8: mod_base = OTHER; note = 2'-O-methyluridine-3'-phosphate
  modified_base 9: mod_base = OTHER; note = 2'-deoxy-2'-fluorouridine-3'-phosphate
  modified_base 10: mod_base = OTHER; note = 2'-deoxy-2'-fluorocytidine-3'-phosphate
  modified_base 11: mod_base = OTHER; note = 2'-deoxy-2'-fluorouridine-3'-phosphate
  modified_base 12: mod_base = OTHER; note = 2'-O-methyluridine-3'-phosphate
  modified_base 13: mod_base = OTHER; note = 2'-deoxy-2'-fluoroguanosine-3'-phosphate
  modified_base 14: mod_base = OTHER; note = 2'-O-methylcytidine-3'-phosphate
  modified_base 15: mod_base = OTHER; note = 2'-deoxy-2'-fluorouridine-3'-phosphate
  modified_base 16: mod_base = OTHER; note = 2'-O-methylcytidine-3'-phosphate
  modified_base 17: mod_base = OTHER; note = 2'-deoxy-2'-fluorouridine-3'-phosphate
  modified_base 18: mod_base = OTHER; note = 2'-O-methyladenosine-3'-phosphate
  modified_base 19: mod_base = OTHER; note = 2'-deoxy-2'-fluorouridine-3'-phosphorothioate
  modified_base 20: mod_base = OTHER; note = 2'-O-methyladenosine-3'-phosphorothioate
  modified_base 21: mod_base = OTHER; note = 2'-deoxy-2'-fluoroadenosine
aacagtgttcttgctctataa

SEQ ID NO: 295 - RNA, 21 nt, synthetic construct
  source 1..21: mol_type = other RNA
  modified_base 1: mod_base = OTHER; note = 2'-O-methyladenosine-3'-phosphorothioate
  modified_base 2: mod_base = OTHER; note = 2'-O-methyladenosine-3'-phosphorothioate
  modified_base 3: mod_base = OTHER; note = 2'-deoxy-2'-fluorocytidine-3'-phosphate
  modified_base 4: mod_base = OTHER; note = 2'-O-methyladenosine-3'-phosphate
  modified_base 5: mod_base = OTHER; note = 2'-deoxy-2'-fluoroguanosine-3'-phosphate
  modified_base 6: mod_base = OTHER; note = 2'-O-methyluridine-3'-phosphate
  modified_base 7: mod_base = OTHER; note = 2'-deoxy-2'-fluoroguanosine-3'-phosphate
  modified_base 8: mod_base = OTHER; note = 2'-O-methyluridine-3'-phosphate
  modified_base 9: mod_base = OTHER; note = 2'-deoxy-2'-fluorouridine-3'-phosphate
  modified_base 10: mod_base = OTHER; note = 2'-deoxy-2'-fluorocytidine-3'-phosphate
  modified_base 11: mod_base = OTHER; note = 2'-deoxy-2'-fluorouridine-3'-phosphate
  modified_base 12: mod_base = OTHER; note = 2'-O-methyluridine-3'-phosphate
  modified_base 13: mod_base = OTHER; note = 2'-deoxy-2'-fluoroguanosine-3'-phosphate
  modified_base 14: mod_base = OTHER; note = 2'-O-methylcytidine-3'-phosphate
  modified_base 15: mod_base = OTHER; note = 2'-deoxy-2'-fluorouridine-3'-phosphate
  modified_base 16: mod_base = OTHER; note = 2'-O-methylcytidine-3'-phosphate
  modified_base 17: mod_base = OTHER; note = 2'-deoxy-2'-fluorouridine-3'-phosphate
  modified_base 18: mod_base = OTHER; note = 2'-O-methyladenosine-3'-phosphate
  modified_base 19: mod_base = OTHER; note = 2'-deoxy-2'-fluorouridine-3'-phosphorothioate
  modified_base 20: mod_base = OTHER; note = 2'-O-methyladenosine-3'-phosphorothioate
  modified_base 21: mod_base = OTHER; note = 2'-deoxy-2'-fluoroadenosine-3'-phosphate (4R-((((4R-(hydroxy)-1-(6-((S)-2-(4-isobutylphenyl)propanam ido)hexanoyl)pyrrolidin-2S-yl)methoxy)hydroxyphosphoryl)oxy )-1-(6-((S)-2-(4-isobutylphenyl)propanamido)hexanoyl)pyrrol idin-2S-yl)methyl ester
aacagtgttcttgctctataa

SEQ ID NO: 296 - RNA, 21 nt, synthetic construct
  source 1..21: mol_type = other RNA
  modified_base 1: mod_base = OTHER; note = 2'-O-methyladenosine-3'-phosphorothioate
  modified_base 2: mod_base = OTHER; note = 2'-O-methyladenosine-3'-phosphorothioate
  modified_base 3: mod_base = OTHER; note = 2'-deoxy-2'-fluorocytidine-3'-phosphate
  modified_base 4: mod_base = OTHER; note = 2'-O-methyladenosine-3'-phosphate
  modified_base 5: mod_base = OTHER; note = 2'-deoxy-2'-fluoroguanosine-3'-phosphate
  modified_base 6: mod_base = OTHER; note = 2'-O-methyluridine-3'-phosphate
  modified_base 7: mod_base = OTHER; note = 2'-deoxy-2'-fluoroguanosine-3'-phosphate
  modified_base 8: mod_base = OTHER; note = 2'-O-methyluridine-3'-phosphate
  modified_base 9: mod_base = OTHER; note = 2'-deoxy-2'-fluorouridine-3'-phosphate
  modified_base 10: mod_base = OTHER; note = 2'-deoxy-2'-fluorocytidine-3'-phosphate
  modified_base 11: mod_base = OTHER; note = 2'-deoxy-2'-fluorouridine-3'-phosphate
  modified_base 12: mod_base = OTHER; note = 2'-O-methyluridine-3'-phosphate
  modified_base 13: mod_base = OTHER; note = 2'-deoxy-2'-fluoroguanosine-3'-phosphate
  modified_base 14: mod_base = OTHER; note = 2'-O-methylcytidine-3'-phosphate
  modified_base 15: mod_base = OTHER; note = 2'-deoxy-2'-fluorouridine-3'-phosphate
  modified_base 16: mod_base = OTHER; note = 2'-O-methylcytidine-3'-phosphate
  modified_base 17: mod_base = OTHER; note = 2'-deoxy-2'-fluorouridine-3'-phosphate
  modified_base 18: mod_base = OTHER; note = 2'-O-methyladenosine-3'-phosphate
  modified_base 19: mod_base = OTHER; note = 2'-deoxy-2'-fluorouridine-3'-phosphorothioate
  modified_base 20: mod_base = OTHER; note = 2'-O-methyladenosine-3'-phosphorothioate
  modified_base 21: mod_base = OTHER; note = 2'-deoxy-2'-fluoroadenosine-3'-phosphate (N-(1-oxo-6-((3beta-cholest-5-en-3-yl)oxcarboxamido)hexyl)- 4R-hydroxypyrrolidin-2S-yl)methyl ester
aacagtgttcttgctctataa

SEQ ID NO: 297 - RNA, 21 nt, synthetic construct
  source 1..21: mol_type = other RNA
  modified_base 1: mod_base = OTHER; note = 2'-O-methyladenosine-3'-phosphorothioate
  modified_base 2: mod_base = OTHER; note = 2'-O-methyladenosine-3'-phosphorothioate
  modified_base 3: mod_base = OTHER; note = 2'-deoxy-2'-fluorocytidine-3'-phosphate
  modified_base 4: mod_base = OTHER; note = 2'-O-methyladenosine-3'-phosphate
  modified_base 5: mod_base = OTHER; note = 2'-deoxy-2'-fluoroguanosine-3'-phosphate
  modified_base 6: mod_base = OTHER; note = 2'-O-methyluridine-3'-phosphate
  modified_base 7: mod_base = OTHER; note = 2'-deoxy-2'-fluoroguanosine-3'-phosphate
  modified_base 8: mod_base = OTHER; note = 2'-O-methyluridine-3'-phosphate
  modified_base 9: mod_base = OTHER; note = 2'-deoxy-2'-fluorouridine-3'-phosphate
  modified_base 10: mod_base = OTHER; note = 2'-deoxy-2'-fluorocytidine-3'-phosphate
  modified_base 11: mod_base = OTHER; note = 2'-deoxy-2'-fluorouridine-3'-phosphate
  modified_base 12: mod_base = OTHER; note = 2'-O-methyluridine-3'-phosphate
  modified_base 13: mod_base = OTHER; note = 2'-deoxy-2'-fluoroguanosine-3'-phosphate
  modified_base 14: mod_base = OTHER; note = 2'-O-methylcytidine-3'-phosphate
  modified_base 15: mod_base = OTHER; note = 2'-deoxy-2'-fluorouridine-3'-phosphate
  modified_base 16: mod_base = OTHER; note = 2'-O-methylcytidine-3'-phosphate
  modified_base 17: mod_base = OTHER; note = 2'-deoxy-2'-fluorouridine-3'-phosphate
  modified_base 18: mod_base = OTHER; note = 2'-O-methyladenosine-3'-phosphate
  modified_base 19: mod_base = OTHER; note = 2'-deoxy-2'-fluorouridine-3'-phosphorothioate
  modified_base 20: mod_base = OTHER; note = 2'-O-methyladenosine-3'-phosphorothioate
  modified_base 21: mod_base = OTHER; note = 2'-deoxy-2'-fluoroadenosine
aacagtgttcttgctctataa

SEQ ID NO: 298 - RNA, 21 nt, synthetic construct
  source 1..21: mol_type = other RNA
  modified_base 1: mod_base = OTHER; note = 2'-O-methyladenosine-3'-phosphorothioate
  modified_base 2: mod_base = OTHER; note = 2'-O-methyladenosine-3'-phosphorothioate
  modified_base 3: mod_base = OTHER; note = 2'-deoxy-2'-fluorocytidine-3'-phosphate
  modified_base 4: mod_base = OTHER; note = 2'-O-methyladenosine-3'-phosphate
  modified_base 5: mod_base = OTHER; note = 2'-deoxy-2'-fluoroguanosine-3'-phosphate
  modified_base 6: mod_base = OTHER; note = 2'-O-methyluridine-3'-phosphate
  modified_base 7: mod_base = OTHER; note = 2'-deoxy-2'-fluoroguanosine-3'-phosphate
  modified_base 8: mod_base = OTHER; note = 2'-O-methyluridine-3'-phosphate
  modified_base 9: mod_base = OTHER; note = 2'-deoxy-2'-fluorouridine-3'-phosphate
  modified_base 10: mod_base = OTHER; note = 2'-deoxy-2'-fluorocytidine-3'-phosphate
  modified_base 11: mod_base = OTHER; note = 2'-deoxy-2'-fluorouridine-3'-phosphate
  modified_base 12: mod_base = OTHER; note = 2'-O-methyluridine-3'-phosphate
  modified_base 13: mod_base = OTHER; note = 2'-deoxy-2'-fluoroguanosine-3'-phosphate
  modified_base 14: mod_base = OTHER; note = 2'-O-methylcytidine-3'-phosphate
  modified_base 15: mod_base = OTHER; note = 2'-deoxy-2'-fluorouridine-3'-phosphate
  modified_base 16: mod_base = OTHER; note = 2'-O-methylcytidine-3'-phosphate
  modified_base 17: mod_base = OTHER; note = 2'-deoxy-2'-fluorouridine-3'-phosphate
  modified_base 18: mod_base = OTHER; note = 2'-O-methyladenosine-3'-phosphate
  modified_base 19: mod_base = OTHER; note = 2'-deoxy-2'-fluorouridine-3'-phosphorothioate
  modified_base 20: mod_base = OTHER; note = 2'-O-methyladenosine-3'-phosphorothioate
  modified_base 21: mod_base = OTHER; note = 2'-deoxy-2'-fluoroadenosine-3'-phosphate (4R-((((4R-(hydroxy)-1-(6-((S)-2-(4-isobutylphenyl)propanam ido)hexanoyl)pyrrolidin-2S-yl)methoxy)hydroxyphosphoryl)oxy )-1-(6-((S)-2-(4-isobutylphenyl)propanamido)hexanoyl)pyrrol idin-2S-yl)methyl ester
aacagtgttcttgctctataa

SEQ ID NO: 299 - RNA, 21 nt, synthetic construct
  source 1..21: mol_type = other RNA
  modified_base 1: mod_base = OTHER; note = 2'-O-methyladenosine-3'-phosphorothioate
  modified_base 2: mod_base = OTHER; note = 2'-O-methyladenosine-3'-phosphorothioate
  modified_base 3: mod_base = OTHER; note = 2'-deoxy-2'-fluorocytidine-3'-phosphate
  modified_base 4: mod_base = OTHER; note = 2'-O-methyladenosine-3'-phosphate
  modified_base 5: mod_base = OTHER; note = 2'-deoxy-2'-fluoroguanosine-3'-phosphate
  modified_base 6: mod_base = OTHER; note = 2'-O-methyluridine-3'-phosphate
  modified_base 7: mod_base = OTHER; note = 2'-deoxy-2'-fluoroguanosine-3'-phosphate
  modified_base 8: mod_base = OTHER; note = 2'-O-methyluridine-3'-phosphate
  modified_base 9: mod_base = OTHER; note = 2'-deoxy-2'-fluorouridine-3'-phosphate
  modified_base 10: mod_base = OTHER; note = 2'-deoxy-2'-fluorocytidine-3'-phosphate
  modified_base 11: mod_base = OTHER; note = 2'-deoxy-2'-fluorouridine-3'-phosphate
  modified_base 12: mod_base = OTHER; note = 2'-O-methyluridine-3'-phosphate
  modified_base 13: mod_base = OTHER; note = 2'-deoxy-2'-fluoroguanosine-3'-phosphate
  modified_base 14: mod_base = OTHER; note = 2'-O-methylcytidine-3'-phosphate
  modified_base 15: mod_base = OTHER; note = 2'-deoxy-2'-fluorouridine-3'-phosphate
  modified_base 16: mod_base = OTHER; note = 2'-O-methylcytidine-3'-phosphate
  modified_base 17: mod_base = OTHER; note = 2'-deoxy-2'-fluorouridine-3'-phosphate
  modified_base 18: mod_base = OTHER; note = 2'-O-methyladenosine-3'-phosphate
  modified_base 19: mod_base = OTHER; note = 2'-deoxy-2'-fluorouridine-3'-phosphorothioate
  modified_base 20: mod_base = OTHER; note = 2'-O-methyladenosine-3'-phosphorothioate
  modified_base 21: mod_base = OTHER; note = 2'-deoxy-2'-fluoroadenosine-3'-phosphate (N-(1-oxo-6-((3beta-cholest-5-en-3-yl)oxcarboxamido)hexyl)- 4R-hydroxypyrrolidin-2S-yl)methyl ester
aacagtgttcttgctctataa

SEQ ID NO: 300 - RNA, 21 nt, synthetic construct
  source 1..21: mol_type = other RNA
  modified_base 1: mod_base = OTHER; note = 2'-O-methyladenosine-3'-phosphorothioate
  modified_base 2: mod_base = OTHER; note = 2'-O-methyladenosine-3'-phosphorothioate
  modified_base 3: mod_base = OTHER; note = 2'-O-methylcytidine-3'-phosphate
  modified_base 4: mod_base = OTHER; note = 2'-O-methyladenosine-3'-phosphate
  modified_base 5: mod_base = OTHER; note = 2'-O-methylguanosine-3'-phosphate
  modified_base 6: mod_base = OTHER; note = 2'-O-methyluridine-3'-phosphate
  modified_base 7: mod_base = OTHER; note = 2'-deoxy-2'-fluoroguanosine-3'-phosphate
  modified_base 8: mod_base = OTHER; note = 2'-O-methyluridine-3'-phosphate
  modified_base 9: mod_base = OTHER; note = 2'-deoxy-2'-fluorouridine-3'-phosphate
  modified_base 10: mod_base = OTHER; note = 2'-deoxy-2'-fluorocytidine-3'-phosphate
  modified_base 11: mod_base = OTHER; note = 2'-deoxy-2'-fluorouridine-3'-phosphate
  modified_base 12: mod_base = OTHER; note = 2'-O-methyluridine-3'-phosphate
  modified_base 13: mod_base = OTHER; note = 2'-deoxy-2'-fluoroguanosine-3'-phosphate
  modified_base 14: mod_base = OTHER; note = 2'-O-methylcytidine-3'-phosphate
  modified_base 15: mod_base = OTHER; note = 2'-O-methyluridine-3'-phosphate
  modified_base 16: mod_base = OTHER; note = 2'-O-methylcytidine-3'-phosphate
  modified_base 17: mod_base = OTHER; note = 2'-O-methyluridine-3'-phosphate
  modified_base 18: mod_base = OTHER; note = 2'-O-methyladenosine-3'-phosphate
  modified_base 19: mod_base = OTHER; note = 2'-O-methyluridine-3'-phosphorothioate
  modified_base 20: mod_base = OTHER; note = 2'-O-methyladenosine-3'-phosphorothioate
  modified_base 21: mod_base = OTHER; note = 2'-O-methyladenosine
aacagtgttcttgctctataa

SEQ ID NO: 301 - RNA, 21 nt, synthetic construct
  source 1..21: mol_type = other RNA
  modified_base 1: mod_base = OTHER; note = 2'-O-methyladenosine-3'-phosphorothioate
  modified_base 2: mod_base = OTHER; note = 2'-O-methyladenosine-3'-phosphorothioate
  modified_base 3: mod_base = OTHER; note = 2'-O-methylcytidine-3'-phosphate
  modified_base 4: mod_base = OTHER; note = 2'-O-methyladenosine-3'-phosphate
  modified_base 5: mod_base = OTHER; note = 2'-O-methylguanosine-3'-phosphate
  modified_base 6: mod_base = OTHER; note = 2'-O-methyluridine-3'-phosphate
  modified_base 7: mod_base = OTHER; note = 2'-deoxy-2'-fluoroguanosine-3'-phosphate
  modified_base 8: mod_base = OTHER; note = 2'-O-methyluridine-3'-phosphate
  modified_base 9: mod_base = OTHER; note = 2'-deoxy-2'-fluorouridine-3'-phosphate
  modified_base 10: mod_base = OTHER; note = 2'-deoxy-2'-fluorocytidine-3'-phosphate
  modified_base 11: mod_base = OTHER; note = 2'-deoxy-2'-fluorouridine-3'-phosphate
  modified_base 12: mod_base = OTHER; note = 2'-O-methyluridine-3'-phosphate
  modified_base 13: mod_base = OTHER; note = 2'-deoxy-2'-fluoroguanosine-3'-phosphate
  modified_base 14: mod_base = OTHER; note = 2'-O-methylcytidine-3'-phosphate
  modified_base 15: mod_base = OTHER; note = 2'-O-methyluridine-3'-phosphate
  modified_base 16: mod_base = OTHER; note = 2'-O-methylcytidine-3'-phosphate
  modified_base 17: mod_base = OTHER; note = 2'-O-methyluridine-3'-phosphate
  modified_base 18: mod_base = OTHER; note = 2'-O-methyladenosine-3'-phosphate
  modified_base 19: mod_base = OTHER; note = 2'-O-methyluridine-3'-phosphorothioate
  modified_base 20: mod_base = OTHER; note = 2'-O-methyladenosine-3'-phosphorothioate
  modified_base 21: mod_base = OTHER; note = 2'-O-methyladenosine-3'-phosphate (4R-((((4R-(hydroxy)-1-(6-((S)-2-(4-isobutylphenyl)propanam ido)hexanoyl)pyrrolidin-2S-yl)methoxy)hydroxyphosphoryl)oxy )-1-(6-((S)-2-(4-isobutylphenyl)propanamido)hexanoyl)pyrrol idin-2S-yl)methyl ester
aacagtgttcttgctctataa

SEQ ID NO: 302 - RNA, 21 nt, synthetic construct
  source 1..21: mol_type = other RNA
  modified_base 1: mod_base = OTHER; note = 2'-O-methyladenosine-3'-phosphorothioate
  modified_base 2: mod_base = OTHER; note = 2'-O-methyladenosine-3'-phosphorothioate
  modified_base 3: mod_base = OTHER; note = 2'-O-methylcytidine-3'-phosphate
  modified_base 4: mod_base = OTHER; note = 2'-O-methyladenosine-3'-phosphate
  modified_base 5: mod_base = OTHER; note = 2'-O-methylguanosine-3'-phosphate
  modified_base 6: mod_base = OTHER; note = 2'-O-methyluridine-3'-phosphate
  modified_base 7: mod_base = OTHER; note = 2'-deoxy-2'-fluoroguanosine-3'-phosphate
  modified_base 8: mod_base = OTHER; note = 2'-O-methyluridine-3'-phosphate
  modified_base 9: mod_base = OTHER; note = 2'-deoxy-2'-fluorouridine-3'-phosphate
  modified_base 10: mod_base = OTHER; note = 2'-deoxy-2'-fluorocytidine-3'-phosphate
  modified_base 11: mod_base = OTHER; note = 2'-deoxy-2'-fluorouridine-3'-phosphate
  modified_base 12: mod_base = OTHER; note = 2'-O-methyluridine-3'-phosphate
  modified_base 13: mod_base = OTHER; note = 2'-deoxy-2'-fluoroguanosine-3'-phosphate
  modified_base 14: mod_base = OTHER; note = 2'-O-methylcytidine-3'-phosphate
  modified_base 15: mod_base = OTHER; note = 2'-O-methyluridine-3'-phosphate
  modified_base 16: mod_base = OTHER; note = 2'-O-methylcytidine-3'-phosphate
  modified_base 17: mod_base = OTHER; note = 2'-O-methyluridine-3'-phosphate
  modified_base 18: mod_base = OTHER; note = 2'-O-methyladenosine-3'-phosphate
  modified_base 19: mod_base = OTHER; note = 2'-O-methyluridine-3'-phosphorothioate
  modified_base 20: mod_base = OTHER; note = 2'-O-methyladenosine-3'-phosphorothioate
  modified_base 21: mod_base = OTHER; note = 2'-O-methyladenosine-3'-phosphate (N-(1-oxo-6-((3beta-cholest-5-en-3-yl)oxcarboxamido)hexyl)- 4R-hydroxypyrrolidin-2S-yl)methyl ester
aacagtgttcttgctctataa

SEQ ID NO: 303 - RNA, 23 nt, synthetic construct
  source 1..23: mol_type = other RNA
  modified_base 1: mod_base = OTHER; note = 2'-O-methyluridine-3'-phosphorothioate
  modified_base 2: mod_base = OTHER; note = 2'-deoxy-2'-fluorouridine-3'-phosphorothioate
  modified_base 3: mod_base = OTHER; note = 2'-O-methyladenosine-3'-phosphate
  modified_base 4: mod_base = OTHER; note = 2'-deoxy-2'-fluorouridine-3'-phosphate
  modified_base 5: mod_base = OTHER; note = 2'-O-methyladenosine-3'-phosphate
  modified_base 6: mod_base = OTHER; note = 2'-deoxy-2'-fluoroguanosine-3'-phosphate
  modified_base 7: mod_base = OTHER; note = 2'-O-methyladenosine-3'-phosphate
  modified_base 8: mod_base = OTHER; note = 2'-deoxy-2'-fluoroguanosine-3'-phosphate
  modified_base 9: mod_base = OTHER; note = 2'-O-methylcytidine-3'-phosphate
  modified_base 10: mod_base = OTHER; note = 2'-deoxy-2'-fluoroadenosine-3'-phosphate
  modified_base 11: mod_base = OTHER; note = 2'-O-methyladenosine-3'-phosphate
  modified_base 12: mod_base = OTHER; note = 2'-O-methylguanosine-3'-phosphate
  modified_base 13: mod_base = OTHER; note = 2'-O-methyladenosine-3'-phosphate
  modified_base 14: mod_base = OTHER; note = 2'-deoxy-2'-fluoroadenosine-3'-phosphate
  modified_base 15: mod_base = OTHER; note = 2'-O-methylcytidine-3'-phosphate
  modified_base 16: mod_base = OTHER; note = 2'-deoxy-2'-fluoroadenosine-3'-phosphate
  modified_base 17: mod_base = OTHER; note = 2'-O-methylcytidine-3'-phosphate
  modified_base 18: mod_base = OTHER; note = 2'-deoxy-2'-fluorouridine-3'-phosphate
  modified_base 19: mod_base = OTHER; note = 2'-O-methylguanosine-3'-phosphate
  modified_base 20: mod_base = OTHER; note = 2'-deoxy-2'-fluorouridine-3'-phosphate
  modified_base 21: mod_base = OTHER; note = 2'-O-methyluridine-3'-phosphorothioate
  modified_base 22: mod_base = OTHER; note = 2'-O-methyluridine-3'-phosphorothioate
  modified_base 23: mod_base = OTHER; note = 2'-O-methyluridine-3'-phosphate ((2S,4R)-1-[29-[[2-(acetylamino)-2-deoxy-beta-D-galactopyra nosyl]oxy]-14,14-bis[[3-[[3-[[5-[[2-(acetylamino)-2-deoxy-b eta-D-galactopyranosyl]oxy]-1-oxopentyl]amino]propyl]amino] -3-oxopropoxy]methyl]-1,12,19,25-tetraoxo-16-oxa-13,20,24-t riazanonacos-1-yl]-4-hydroxy-2-pyrrolidinyl)methyl ester
ttatagagcaagaacactgtttt

SEQ ID NO: 304 - RNA, 23 nt, synthetic construct
  source 1..23: mol_type = other RNA
  modified_base 1: mod_base = OTHER; note = 2'-O-methyluridine-3'-phosphorothioate
  modified_base 2: mod_base = OTHER; note = 2'-deoxy-2'-fluorouridine-3'-phosphorothioate
  modified_base 3: mod_base = OTHER; note = 2'-O-methyladenosine-3'-phosphate
  modified_base 4: mod_base = OTHER; note = 2'-deoxy-2'-fluorouridine-3'-phosphate
  modified_base 5: mod_base = OTHER; note = 2'-O-methyladenosine-3'-phosphate
  modified_base 6: mod_base = OTHER; note = 2'-deoxy-2'-fluoroguanosine-3'-phosphate
  modified_base 7: mod_base = OTHER; note = 2'-O-methyladenosine-3'-phosphate
  modified_base 8: mod_base = OTHER; note = 2'-deoxy-2'-fluoroguanosine-3'-phosphate
  modified_base 9: mod_base = OTHER; note = 2'-O-methylcytidine-3'-phosphate
  modified_base 10: mod_base = OTHER; note = 2'-deoxy-2'-fluoroadenosine-3'-phosphate
  modified_base 11: mod_base = OTHER; note = 2'-O-methyladenosine-3'-phosphate
  modified_base 12: mod_base = OTHER; note = 2'-O-methylguanosine-3'-phosphate
  modified_base 13: mod_base = OTHER; note = 2'-O-methyladenosine-3'-phosphate
  modified_base 14: mod_base = OTHER; note = 2'-deoxy-2'-fluoroadenosine-3'-phosphate
  modified_base 15: mod_base = OTHER; note = 2'-O-methylcytidine-3'-phosphate
  modified_base 16: mod_base = OTHER; note = 2'-deoxy-2'-fluoroadenosine-3'-phosphate
  modified_base 17: mod_base = OTHER; note = 2'-O-methylcytidine-3'-phosphate
  modified_base 18: mod_base = OTHER; note = 2'-deoxy-2'-fluorouridine-3'-phosphate
  modified_base 19: mod_base = OTHER; note = 2'-O-methylguanosine-3'-phosphate
  modified_base 20: mod_base = OTHER; note = 2'-deoxy-2'-fluorouridine-3'-phosphate
  modified_base 21: mod_base = OTHER; note = 2'-O-methyluridine-3'-phosphorothioate
  modified_base 22: mod_base = OTHER; note = 2'-O-methyluridine-3'-phosphorothioate
  modified_base 23: mod_base = OTHER; note = 2'-O-methyluridine-3'-phosphate ((2S,4R)-1-[29-[[2-(acetylamino)-2-deoxy-beta-D-galactopyra nosyl]oxy]-14,14-bis[[3-[[3-[[5-[[2-(acetylamino)-2-deoxy-b eta-D-galactopyranosyl]oxy]-1-oxopentyl]amino]propyl]amino] -3-oxopropoxy]methyl]-1,12,19,25-tetraoxo-16-oxa-13,20,24-t riazanonacos-1-yl]-4-hydroxy-2-pyrrolidinyl)methyl ester
ttatagagcaagaacactgtttt

SEQ ID NO: 305 - RNA, 23 nt, synthetic construct
  source 1..23: mol_type = other RNA
  modified_base 1: mod_base = OTHER; note = 2'-O-methyluridine-3'-phosphorothioate
  modified_base 2: mod_base = OTHER; note = 2'-deoxy-2'-fluorouridine-3'-phosphorothioate
  modified_base 3: mod_base = OTHER; note = 2'-O-methyladenosine-3'-phosphate
  modified_base 4: mod_base = OTHER; note = 2'-deoxy-2'-fluorouridine-3'-phosphate
  modified_base 5: mod_base = OTHER; note = 2'-O-methyladenosine-3'-phosphate
  modified_base 6: mod_base = OTHER; note = 2'-deoxy-2'-fluoroguanosine-3'-phosphate
  modified_base 7: mod_base = OTHER; note = 2'-O-methyladenosine-3'-phosphate
  modified_base 8: mod_base = OTHER; note = 2'-deoxy-2'-fluoroguanosine-3'-phosphate
  modified_base 9: mod_base = OTHER; note = 2'-O-methylcytidine-3'-phosphate
  modified_base 10: mod_base = OTHER; note = 2'-deoxy-2'-fluoroadenosine-3'-phosphate
  modified_base 11: mod_base = OTHER; note = 2'-O-methyladenosine-3'-phosphate
  modified_base 12: mod_base = OTHER; note = 2'-O-methylguanosine-3'-phosphate
  modified_base 13: mod_base = OTHER; note = 2'-O-methyladenosine-3'-phosphate
  modified_base 14: mod_base = OTHER; note = 2'-deoxy-2'-fluoroadenosine-3'-phosphate
  modified_base 15: mod_base = OTHER; note = 2'-O-methylcytidine-3'-phosphate
  modified_base 16: mod_base = OTHER; note = 2'-deoxy-2'-fluoroadenosine-3'-phosphate
  modified_base 17: mod_base = OTHER; note = 2'-O-methylcytidine-3'-phosphate
  modified_base 18: mod_base = OTHER; note = 2'-deoxy-2'-fluorouridine-3'-phosphate
  modified_base 19: mod_base = OTHER; note = 2'-O-methylguanosine-3'-phosphate
  modified_base 20: mod_base = OTHER; note = 2'-deoxy-2'-fluorouridine-3'-phosphate
  modified_base 21: mod_base = OTHER; note = 2'-O-methyluridine-3'-phosphorothioate
  modified_base 22: mod_base = OTHER; note = 2'-O-methyluridine-3'-phosphorothioate
  modified_base 23: mod_base = OTHER; note = 2'-O-methyluridine-3'-phosphate ((2S,4R)-1-[29-[[2-(acetylamino)-2-deoxy-beta-D-galactopyra nosyl]oxy]-14,14-bis[[3-[[3-[[5-[[2-(acetylamino)-2-deoxy-b eta-D-galactopyranosyl]oxy]-1-oxopentyl]amino]propyl]amino] -3-oxopropoxy]methyl]-1,12,19,25-tetraoxo-16-oxa-13,20,24-t riazanonacos-1-yl]-4-hydroxy-2-pyrrolidinyl)methyl ester
ttatagagcaagaacactgtttt

SEQ ID NO: 306 - RNA, 22 nt, synthetic construct
  source 1..22: mol_type = other RNA
  modified_base 1: mod_base = OTHER; note = 2'-O-methyluridine-3'-phosphorothioate
  modified_base 2: mod_base = OTHER; note = 2'-deoxy-2'-fluorouridine-3'-phosphorothioate
  modified_base 3: mod_base = OTHER; note = 2'-O-methyladenosine-3'-phosphate
  modified_base 4: mod_base = OTHER; note = 2'-deoxy-2'-fluorouridine-3'-phosphate
  modified_base 5: mod_base = OTHER; note = 2'-O-methyladenosine-3'-phosphate
  modified_base 6: mod_base = OTHER; note = 2'-deoxy-2'-fluoroguanosine-3'-phosphate
  modified_base 7: mod_base = OTHER; note = 2'-O-methyladenosine-3'-phosphate
  modified_base 8: mod_base = OTHER; note = 2'-deoxy-2'-fluoroguanosine-3'-phosphate
  modified_base 9: mod_base = OTHER; note = 2'-O-methylcytidine-3'-phosphate
  modified_base 10: mod_base = OTHER; note = 2'-deoxy-2'-fluoroadenosine-3'-phosphate
  modified_base 11: mod_base = OTHER; note = 2'-O-methyladenosine-3'-phosphate
  modified_base 12: mod_base = OTHER; note = 2'-O-methylguanosine-3'-phosphate
  modified_base 13: mod_base = OTHER; note = 2'-O-methyladenosine-3'-phosphate
  modified_base 14: mod_base = OTHER; note = 2'-deoxy-2'-fluoroadenosine-3'-phosphate
  modified_base 15: mod_base = OTHER; note = 2'-O-methylcytidine-3'-phosphate
  modified_base 16: mod_base = OTHER; note = 2'-deoxy-2'-fluoroadenosine-3'-phosphate
  modified_base 17: mod_base = OTHER; note = 2'-O-methylcytidine-3'-phosphate
  modified_base 18: mod_base = OTHER; note = 2'-deoxy-2'-fluorouridine-3'-phosphate
  modified_base 19: mod_base = OTHER; note = 2'-O-methylguanosine-3'-phosphate
  modified_base 20: mod_base = OTHER; note = 2'-deoxy-2'-fluorouridine-3'-phosphorothioate
  modified_base 21: mod_base = OTHER; note = 2'-O-methyluridine-3'-phosphorothioate
  modified_base 22: mod_base = OTHER; note = 2'-O-methyluridine-3'-phosphate ((2S,4R)-1-[29-[[2-(acetylamino)-2-deoxy-beta-D-galactopyra nosyl]oxy]-14,14-bis[[3-[[3-[[5-[[2-(acetylamino)-2-deoxy-b eta-D-galactopyranosyl]oxy]-1-oxopentyl]amino]propyl]amino] -3-oxopropoxy]methyl]-1,12,19,25-tetraoxo-16-oxa-13,20,24-t riazanonacos-1-yl]-4-hydroxy-2-pyrrolidinyl)methyl ester
ttatagagcaagaacactgttt

SEQ ID NO: 307 - RNA, 22 nt, synthetic construct
  source 1..22: mol_type = other RNA
  modified_base 1: mod_base = OTHER; note = 2'-O-methyluridine-3'-phosphorothioate
  modified_base 2: mod_base = OTHER; note = 2'-deoxy-2'-fluorouridine-3'-phosphorothioate
  modified_base 3: mod_base = OTHER; note = 2'-O-methyladenosine-3'-phosphate
  modified_base 4: mod_base = OTHER; note = 2'-deoxy-2'-fluorouridine-3'-phosphate
  modified_base 5: mod_base = OTHER; note = 2'-O-methyladenosine-3'-phosphate
  modified_base 6: mod_base = OTHER; note = 2'-deoxy-2'-fluoroguanosine-3'-phosphate
  modified_base 7: mod_base = OTHER; note = 2'-O-methyladenosine-3'-phosphate
  modified_base 8: mod_base = OTHER; note = 2'-deoxy-2'-fluoroguanosine-3'-phosphate
  modified_base 9: mod_base = OTHER; note = 2'-O-methylcytidine-3'-phosphate
  modified_base 10: mod_base = OTHER; note = 2'-deoxy-2'-fluoroadenosine-3'-phosphate
  modified_base 11: mod_base = OTHER; note = 2'-O-methyladenosine-3'-phosphate
  modified_base 12: mod_base = OTHER; note = 2'-O-methylguanosine-3'-phosphate
  modified_base 13: mod_base = OTHER; note = 2'-O-methyladenosine-3'-phosphate
  modified_base 14: mod_base = OTHER; note = 2'-deoxy-2'-fluoroadenosine-3'-phosphate
  modified_base 15: mod_base = OTHER; note = 2'-O-methylcytidine-3'-phosphate
  modified_base 16: mod_base = OTHER; note = 2'-deoxy-2'-fluoroadenosine-3'-phosphate
  modified_base 17: mod_base = OTHER; note = 2'-O-methylcytidine-3'-phosphate
  modified_base 18: mod_base = OTHER; note = 2'-deoxy-2'-fluorouridine-3'-phosphate
  modified_base 19: mod_base = OTHER; note = 2'-O-methylguanosine-3'-phosphate
  modified_base 20: mod_base = OTHER; note = 2'-deoxy-2'-fluorouridine-3'-phosphorothioate
  modified_base 21: mod_base = OTHER; note = 2'-O-methyluridine-3'-phosphorothioate
  modified_base 22: mod_base = OTHER; note = 2'-O-methyluridine-3'-phosphate ((2S,4R)-1-[29-[[2-(acetylamino)-2-deoxy-beta-D-galactopyra nosyl]oxy]-14,14-bis[[3-[[3-[[5-[[2-(acetylamino)-2-deoxy-b eta-D-galactopyranosyl]oxy]-1-oxopentyl]amino]propyl]amino] -3-oxopropoxy]methyl]-1,12,19,25-tetraoxo-16-oxa-13,20,24-t riazanonacos-1-yl]-4-hydroxy-2-pyrrolidinyl)methyl ester
ttatagagcaagaacactgttt

SEQ ID NO: 308 - RNA, 22 nt, synthetic construct
  source 1..22: mol_type = other RNA
  modified_base 1: mod_base = OTHER; note = 2'-O-methyluridine-3'-phosphorothioate
  modified_base 2: mod_base = OTHER; note = 2'-deoxy-2'-fluorouridine-3'-phosphorothioate
  modified_base 3: mod_base = OTHER; note = 2'-O-methyladenosine-3'-phosphate
  modified_base 4: mod_base = OTHER; note = 2'-deoxy-2'-fluorouridine-3'-phosphate
  modified_base 5: mod_base = OTHER; note = 2'-O-methyladenosine-3'-phosphate
  modified_base 6: mod_base = OTHER; note = 2'-deoxy-2'-fluoroguanosine-3'-phosphate
  modified_base 7: mod_base = OTHER; note = 2'-O-methyladenosine-3'-phosphate
  modified_base 8: mod_base = OTHER; note = 2'-deoxy-2'-fluoroguanosine-3'-phosphate
  modified_base 9: mod_base = OTHER; note = 2'-O-methylcytidine-3'-phosphate
  modified_base 10: mod_base = OTHER; note = 2'-deoxy-2'-fluoroadenosine-3'-phosphate
  modified_base 11: mod_base = OTHER; note = 2'-O-methyladenosine-3'-phosphate
  modified_base 12: mod_base = OTHER; note = 2'-O-methylguanosine-3'-phosphate
  modified_base 13: mod_base = OTHER; note = 2'-O-methyladenosine-3'-phosphate
  modified_base 14: mod_base = OTHER; note = 2'-deoxy-2'-fluoroadenosine-3'-phosphate
  modified_base 15: mod_base = OTHER; note = 2'-O-methylcytidine-3'-phosphate
  modified_base 16: mod_base = OTHER; note = 2'-deoxy-2'-fluoroadenosine-3'-phosphate
  modified_base 17: mod_base = OTHER; note = 2'-O-methylcytidine-3'-phosphate
  modified_base 18: mod_base = OTHER; note = 2'-deoxy-2'-fluorouridine-3'-phosphate
  modified_base 19: mod_base = OTHER; note = 2'-O-methylguanosine-3'-phosphate
  modified_base 20: mod_base = OTHER; note = 2'-deoxy-2'-fluorouridine-3'-phosphorothioate
  modified_base 21: mod_base = OTHER; note = 2'-O-methyluridine-3'-phosphorothioate
  modified_base 22: mod_base = OTHER; note = 2'-O-methyluridine-3'-phosphate ((2S,4R)-1-[29-[[2-(acetylamino)-2-deoxy-beta-D-galactopyra nosyl]oxy]-14,14-bis[[3-[[3-[[5-[[2-(acetylamino)-2-deoxy-b eta-D-galactopyranosyl]oxy]-1-oxopentyl]amino]propyl]amino] -3-oxopropoxy]methyl]-1,12,19,25-tetraoxo-16-oxa-13,20,24-t riazanonacos-1-yl]-4-hydroxy-2-pyrrolidinyl)methyl ester
ttatagagcaagaacactgttt

SEQ ID NO: 309 - RNA, 22 nt, synthetic construct
  source 1..22: mol_type = other RNA
  modified_base 1: mod_base = OTHER; note = 2'-O-methyluridine-3'-phosphorothioate
  modified_base 2: mod_base = OTHER; note = 2'-deoxy-2'-fluorouridine-3'-phosphorothioate
  modified_base 3: mod_base = OTHER; note = 2'-O-methyladenosine-3'-phosphate
  modified_base 4: mod_base = OTHER; note = 2'-O-methyluridine-3'-phosphate
  modified_base 5: mod_base = OTHER; note = 2'-O-methyladenosine-3'-phosphate
  modified_base 6: mod_base = OTHER; note = 2'-deoxy-2'-fluoroguanosine-3'-phosphate
  modified_base 7: mod_base = OTHER; note = 2'-O-methyladenosine-3'-phosphate
  modified_base 8: mod_base = OTHER; note = 2'-O-methylguanosine-3'-phosphate
  modified_base 9: mod_base = OTHER; note = 2'-O-methylcytidine-3'-phosphate
  modified_base 10: mod_base = OTHER; note = 2'-O-methyladenosine-3'-phosphate
  modified_base 11: mod_base = OTHER; note = 2'-O-methyladenosine-3'-phosphate
  modified_base 12: mod_base = OTHER; note = 2'-O-methylguanosine-3'-phosphate
  modified_base 13: mod_base = OTHER; note = 2'-O-methyladenosine-3'-phosphate
  modified_base 14: mod_base = OTHER; note = 2'-deoxy-2'-fluoroadenosine-3'-phosphate
  modified_base 15: mod_base = OTHER; note = 2'-O-methylcytidine-3'-phosphate
  modified_base 16: mod_base = OTHER; note = 2'-deoxy-2'-fluoroadenosine-3'-phosphate
  modified_base 17: mod_base = OTHER; note = 2'-O-methylcytidine-3'-phosphate
  modified_base 18: mod_base = OTHER; note = 2'-O-methyluridine-3'-phosphate
  modified_base 19: mod_base = OTHER; note = 2'-O-methylguanosine-3'-phosphate
  modified_base 20: mod_base = OTHER; note = 2'-O-methyluridine-3'-phosphorothioate
  modified_base 21: mod_base = OTHER; note = 2'-O-methyluridine-3'-phosphorothioate
  modified_base 22: mod_base = OTHER; note = 2'-O-methyluridine-3'-phosphate ((2S,4R)-1-[29-[[2-(acetylamino)-2-deoxy-beta-D-galactopyra nosyl]oxy]-14,14-bis[[3-[[3-[[5-[[2-(acetylamino)-2-deoxy-b eta-D-galactopyranosyl]oxy]-1-oxopentyl]amino]propyl]amino] -3-oxopropoxy]methyl]-1,12,19,25-tetraoxo-16-oxa-13,20,24-t riazanonacos-1-yl]-4-hydroxy-2-pyrrolidinyl)methyl ester
ttatagagcaagaacactgttt

SEQ ID NO: 310 - RNA, 22 nt, synthetic construct
  source 1..22: mol_type = other RNA
  modified_base 1: mod_base = OTHER; note = 2'-O-methyluridine-3'-phosphorothioate
  modified_base 2: mod_base = OTHER; note = 2'-deoxy-2'-fluorouridine-3'-phosphorothioate
  modified_base 3: mod_base = OTHER; note = 2'-O-methyladenosine-3'-phosphate
  modified_base 4: mod_base = OTHER; note = 2'-O-methyluridine-3'-phosphate
  modified_base 5: mod_base = OTHER; note = 2'-O-methyladenosine-3'-phosphate
  modified_base 6: mod_base = OTHER; note = 2'-deoxy-2'-fluoroguanosine-3'-phosphate
  modified_base 7: mod_base = OTHER; note = 2'-O-methyladenosine-3'-phosphate
  modified_base 8: mod_base = OTHER; note = 2'-O-methylguanosine-3'-phosphate
  modified_base 9: mod_base = OTHER; note = 2'-O-methylcytidine-3'-phosphate
  modified_base 10: mod_base = OTHER; note = 2'-O-methyladenosine-3'-phosphate
  modified_base 11: mod_base = OTHER; note = 2'-O-methyladenosine-3'-phosphate
  modified_base 12: mod_base = OTHER; note = 2'-O-methylguanosine-3'-phosphate
  modified_base 13: mod_base = OTHER; note = 2'-O-methyladenosine-3'-phosphate
  modified_base 14: mod_base = OTHER; note = 2'-deoxy-2'-fluoroadenosine-3'-phosphate
  modified_base 15: mod_base = OTHER; note = 2'-O-methylcytidine-3'-phosphate
  modified_base 16: mod_base = OTHER; note = 2'-deoxy-2'-fluoroadenosine-3'-phosphate
  modified_base 17: mod_base = OTHER; note = 2'-O-methylcytidine-3'-phosphate
  modified_base 18: mod_base = OTHER; note = 2'-O-methyluridine-3'-phosphate
  modified_base 19: mod_base = OTHER; note = 2'-O-methylguanosine-3'-phosphate
  modified_base 20: mod_base = OTHER; note = 2'-O-methyluridine-3'-phosphorothioate
  modified_base 21: mod_base = OTHER; note = 2'-O-methyluridine-3'-phosphorothioate
  modified_base 22: mod_base = OTHER; note = 2'-O-methyluridine-3'-phosphate ((2S,4R)-1-[29-[[2-(acetylamino)-2-deoxy-beta-D-galactopyra nosyl]oxy]-14,14-bis[[3-[[3-[[5-[[2-(acetylamino)-2-deoxy-b eta-D-galactopyranosyl]oxy]-1-oxopentyl]amino]propyl]amino] -3-oxopropoxy]methyl]-1,12,19,25-tetraoxo-16-oxa-13,20,24-t riazanonacos-1-yl]-4-hydroxy-2-pyrrolidinyl)methyl ester
ttatagagcaagaacactgttt

SEQ ID NO: 311 - RNA, 22 nt, synthetic construct
  source 1..22: mol_type = other RNA
  modified_base 1: mod_base = OTHER; note = 2'-O-methyluridine-3'-phosphorothioate
  modified_base 2: mod_base = OTHER; note = 2'-deoxy-2'-fluorouridine-3'-phosphorothioate
  modified_base 3: mod_base = OTHER; note = 2'-O-methyladenosine-3'-phosphate
  modified_base 4: mod_base = OTHER; note = 2'-O-methyluridine-3'-phosphate
  modified_base 5: mod_base = OTHER; note = 2'-O-methyladenosine-3'-phosphate
  modified_base 6: mod_base = OTHER; note = 2'-deoxy-2'-fluoroguanosine-3'-phosphate
  modified_base 7: mod_base = OTHER; note = 2'-O-methyladenosine-3'-phosphate
  modified_base 8: mod_base = OTHER; note = 2'-O-methylguanosine-3'-phosphate
  modified_base 9: mod_base = OTHER; note = 2'-O-methylcytidine-3'-phosphate
  modified_base 10: mod_base = OTHER; note = 2'-O-methyladenosine-3'-phosphate
  modified_base 11: mod_base = OTHER; note = 2'-O-methyladenosine-3'-phosphate
  modified_base 12: mod_base = OTHER; note = 2'-O-methylguanosine-3'-phosphate
  modified_base 13: mod_base = OTHER; note = 2'-O-methyladenosine-3'-phosphate
  modified_base 14: mod_base = OTHER; note = 2'-deoxy-2'-fluoroadenosine-3'-phosphate
  modified_base 15: mod_base = OTHER; note = 2'-O-methylcytidine-3'-phosphate
  modified_base 16: mod_base = OTHER; note = 2'-deoxy-2'-fluoroadenosine-3'-phosphate
  modified_base 17: mod_base = OTHER; note = 2'-O-methylcytidine-3'-phosphate
  modified_base 18: mod_base = OTHER; note = 2'-O-methyluridine-3'-phosphate
  modified_base 19: mod_base = OTHER; note = 2'-O-methylguanosine-3'-phosphate
  modified_base 20: mod_base = OTHER; note = 2'-O-methyluridine-3'-phosphorothioate
  modified_base 21: mod_base = OTHER; note = 2'-O-methyluridine-3'-phosphorothioate
  modified_base 22: mod_base = OTHER; note = 2'-O-methyluridine-3'-phosphate ((2S,4R)-1-[29-[[2-(acetylamino)-2-deoxy-beta-D-galactopyra nosyl]oxy]-14,14-bis[[3-[[3-[[5-[[2-(acetylamino)-2-deoxy-b eta-D-galactopyranosyl]oxy]-1-oxopentyl]amino]propyl]amino] -3-oxopropoxy]methyl]-1,12,19,25-tetraoxo-16-oxa-13,20,24-t riazanonacos-1-yl]-4-hydroxy-2-pyrrolidinyl)methyl ester
ttatagagcaagaacactgttt

SEQ ID NO: 312 - RNA, 21 nt, synthetic construct
  source 1..21: mol_type = other RNA
  modified_base 1: mod_base = OTHER; note = 2'-deoxy-2'-fluorouridine-3'-phosphorothioate
  modified_base 2: mod_base = OTHER; note = 2'-O-methylguanosine-3'-phosphorothioate
  modified_base 3: mod_base = OTHER; note = 2'-deoxy-2'-fluorouridine-3'-phosphate
  modified_base 4: mod_base = OTHER; note = 2'-O-methylguanosine-3'-phosphate
  modified_base 5: mod_base = OTHER; note = 2'-deoxy-2'-fluoroadenosine-3'-phosphate
  modified_base 6: mod_base = OTHER; note = 2'-O-methylcytidine-3'-phosphate
  modified_base 7: mod_base = OTHER; note = 2'-deoxy-2'-fluoroadenosine-3'-phosphate
  modified_base 8: mod_base = OTHER; note = 2'-O-methyladenosine-3'-phosphate
  modified_base 9: mod_base = OTHER; note = 2'-deoxy-2'-fluoroadenosine-3'-phosphate
  modified_base 10: mod_base = OTHER; note = 2'-deoxy-2'-fluorouridine-3'-phosphate
  modified_base 11: mod_base = OTHER; note = 2'-deoxy-2'-fluoroadenosine-3'-phosphate
  modified_base 12: mod_base = OTHER; note = 2'-O-methyluridine-3'-phosphate
  modified_base 13: mod_base = OTHER; note = 2'-deoxy-2'-fluoroguanosine-3'-phosphate
  modified_base 14: mod_base = OTHER; note = 2'-O-methylguanosine-3'-phosphate
  modified_base 15: mod_base = OTHER; note = 2'-deoxy-2'-fluoroguanosine-3'-phosphate
  modified_base 16: mod_base = OTHER; note = 2'-O-methylcytidine-3'-phosphate
  modified_base 17: mod_base = OTHER; note = 2'-deoxy-2'-fluoroadenosine-3'-phosphate
  modified_base 18: mod_base = OTHER; note = 2'-O-methyluridine-3'-phosphate
  modified_base 19: mod_base = OTHER; note = 2'-deoxy-2'-fluorocytidine-3'-phosphate
  modified_base 20: mod_base = OTHER; note = 2'-O-methyladenosine-3'-phosphate
  modified_base 21: mod_base = OTHER; note = 2'-deoxy-2'-fluoroadenosine-3'-phosphate ((2S,4R)-1-[29-[[2-(acetylamino)-2-deoxy-beta-D-galactopyra nosyl]oxy]-14,14-bis[[3-[[3-[[5-[[2-(acetylamino)-2-deoxy-b eta-D-galactopyranosyl]oxy]-1-oxopentyl]amino]propyl]amino] -3-oxopropoxy]methyl]-1,12,19,25-tetraoxo-16-oxa-13,20,24-t riazanonacos-1-yl]-4-hydroxy-2-pyrrolidinyl)methyl ester
tgtgacaaatatgggcatcaa

SEQ ID NO: 313 - RNA, 23 nt, synthetic construct
  source 1..23: mol_type = other RNA
  modified_base 1: mod_base = OTHER; note = 2'-O-methyluridine-3'-phosphorothioate
  modified_base 2: mod_base = OTHER; note = 2'-deoxy-2'-fluorouridine-3'-phosphorothioate
  modified_base 3: mod_base = OTHER; note = 2'-O-methylguanosine-3'-phosphate
  modified_base 4: mod_base = OTHER; note = 2'-deoxy-2'-fluoroadenosine-3'-phosphate
  modified_base 5: mod_base = OTHER; note = 2'-O-methyluridine-3'-phosphate
  modified_base 6: mod_base = OTHER; note = 2'-deoxy-2'-fluoroguanosine-3'-phosphate
  modified_base 7: mod_base = OTHER; note = 2'-O-methylcytidine-3'-phosphate
  modified_base 8: mod_base = OTHER; note = 2'-deoxy-2'-fluorocytidine-3'-phosphate
  modified_base 9: mod_base = OTHER; note = 2'-O-methylcytidine-3'-phosphate
  modified_base 10: mod_base = OTHER; note = 2'-deoxy-2'-fluoroadenosine-3'-phosphate
  modified_base 11: mod_base = OTHER; note = 2'-O-methyluridine-3'-phosphate
  modified_base 12: mod_base = OTHER; note = 2'-O-methyladenosine-3'-phosphate
  modified_base 13: mod_base = OTHER; note = 2'-O-methyluridine-3'-phosphate
  modified_base 14: mod_base = OTHER; note = 2'-deoxy-2'-fluorouridine-3'-phosphate
  modified_base 15: mod_base = OTHER; note = 2'-O-methyluridine-3'-phosphate
  modified_base 16: mod_base = OTHER; note = 2'-deoxy-2'-fluoroguanosine-3'-phosphate
  modified_base 17: mod_base = OTHER; note = 2'-O-methyluridine-3'-phosphate
  modified_base 18: mod_base = OTHER; note = 2'-deoxy-2'-fluorocytidine-3'-phosphate
  modified_base 19: mod_base = OTHER; note = 2'-O-methyladenosine-3'-phosphate
  modified_base 20: mod_base = OTHER; note = 2'-deoxy-2'-fluorocytidine-3'-phosphate
  modified_base 21: mod_base = OTHER; note = 2'-O-methyladenosine-3'-phosphorothioate
  modified_base 22: mod_base = OTHER; note = 2'-O-methyladenosine-3'-phosphorothioate
  modified_base 23: mod_base = OTHER; note = 2'-O-methyladenosine
ttgatgcccatatttgtcacaaa

SEQ ID NO: 314 - RNA, 21 nt, synthetic construct
  source 1..21: mol_type = other RNA
  modified_base 1: mod_base = OTHER; note = 2'-deoxy-2'-fluorouridine-3'-phosphorothioate
  modified_base 2: mod_base = OTHER; note = 2'-O-methylguanosine-3'-phosphorothioate
  modified_base 3: mod_base = OTHER; note = 2'-deoxy-2'-fluorouridine-3'-phosphate
  modified_base 4: mod_base = OTHER; note = 2'-O-methylguanosine-3'-phosphate
  modified_base 5: mod_base = OTHER; note = 2'-deoxy-2'-fluoroadenosine-3'-phosphate
  modified_base 6: mod_base = OTHER; note = 2'-O-methylcytidine-3'-phosphate
  modified_base 7: mod_base = OTHER; note = 2'-deoxy-2'-fluoroadenosine-3'-phosphate
  modified_base 8: mod_base = OTHER; note = 2'-O-methyladenosine-3'-phosphate
  modified_base 9: mod_base = OTHER; note = 2'-deoxy-2'-fluoroadenosine-3'-phosphate
  modified_base 10: mod_base = OTHER; note = 2'-deoxy-2'-fluorouridine-3'-phosphate
  modified_base 11: mod_base = OTHER; note = 2'-deoxy-2'-fluoroadenosine-3'-phosphate
  modified_base 12: mod_base = OTHER; note = 2'-O-methyluridine-3'-phosphate
  modified_base 13: mod_base = OTHER; note = 2'-deoxy-2'-fluoroguanosine-3'-phosphate
  modified_base 14: mod_base = OTHER; note = 2'-O-methylguanosine-3'-phosphate
  modified_base 15: mod_base = OTHER; note = 2'-deoxy-2'-fluoroguanosine-3'-phosphate
  modified_base 16: mod_base = OTHER; note = 2'-O-methylcytidine-3'-phosphate
  modified_base 17: mod_base = OTHER; note = 2'-deoxy-2'-fluoroadenosine-3'-phosphate
  modified_base 18: mod_base = OTHER; note = 2'-O-methyluridine-3'-phosphate
  modified_base 19: mod_base = OTHER; note = 2'-deoxy-2'-fluorocytidine-3'-phosphate
  modified_base 20: mod_base = OTHER; note = 2'-O-methyladenosine-3'-phosphate
  modified_base 21: mod_base = OTHER; note = 2'-deoxy-2'-fluoroadenosine-3'-phosphate ((2S,4R)-1-[29-[[2-(acetylamino)-2-deoxy-beta-D-galactopyra nosyl]oxy]-14,14-bis[[3-[[3-[[5-[[2-(acetylamino)-2-deoxy-b eta-D-galactopyranosyl]oxy]-1-oxopentyl]amino]propyl]amino] -3-oxopropoxy]methyl]-1,12,19,25-tetraoxo-16-oxa-13,20,24-t riazanonacos-1-yl]-4-hydroxy-2-pyrrolidinyl)methyl ester
tgtgacaaatatgggcatcaa

SEQ ID NO: 315 - RNA, 23 nt, synthetic construct
  source 1..23: mol_type = other RNA
  modified_base 1: mod_base = OTHER; note = 2'-O-methyluridine-3'-phosphorothioate 5'-(E)-Vinylphosphonate
  modified_base 2: mod_base = OTHER; note = 2'-deoxy-2'-fluorouridine-3'-phosphorothioate
  modified_base 3: mod_base = OTHER; note = 2'-O-methylguanosine-3'-phosphate
  modified_base 4: mod_base = OTHER; note = 2'-deoxy-2'-fluoroadenosine-3'-phosphate
  modified_base 5: mod_base = OTHER; note = 2'-O-methyluridine-3'-phosphate
  modified_base 6: mod_base = OTHER; note = 2'-deoxy-2'-fluoroguanosine-3'-phosphate
  modified_base 7: mod_base = OTHER; note = 2'-O-methylcytidine-3'-phosphate
  modified_base 8: mod_base = OTHER; note = 2'-deoxy-2'-fluorocytidine-3'-phosphate
  modified_base 9: mod_base = OTHER; note = 2'-O-methylcytidine-3'-phosphate
  modified_base 10: mod_base = OTHER; note = 2'-deoxy-2'-fluoroadenosine-3'-phosphate
  modified_base 11: mod_base = OTHER; note = 2'-O-methyluridine-3'-phosphate
  modified_base 12: mod_base = OTHER; note = 2'-O-methyladenosine-3'-phosphate
  modified_base 13: mod_base = OTHER; note = 2'-O-methyluridine-3'-phosphate
  modified_base 14: mod_base = OTHER; note = 2'-deoxy-2'-fluorouridine-3'-phosphate
  modified_base 15: mod_base = OTHER; note = 2'-O-methyluridine-3'-phosphate
  modified_base 16: mod_base = OTHER; note = 2'-deoxy-2'-fluoroguanosine-3'-phosphate
  modified_base 17: mod_base = OTHER; note = 2'-O-methyluridine-3'-phosphate
  modified_base 18: mod_base = OTHER; note = 2'-deoxy-2'-fluorocytidine-3'-phosphate
  modified_base 19: mod_base = OTHER; note = 2'-O-methyladenosine-3'-phosphate
  modified_base 20: mod_base = OTHER; note = 2'-deoxy-2'-fluorocytidine-3'-phosphate
  modified_base 21: mod_base = OTHER; note = 2'-O-methyladenosine-3'-phosphorothioate
  modified_base 22: mod_base = OTHER; note = 2'-O-methyladenosine-3'-phosphorothioate
  modified_base 23: mod_base = OTHER; note = 2'-O-methyladenosine
ttgatgcccatatttgtcacaaa

SEQ ID NO: 316 - RNA, 21 nt, synthetic construct
  source 1..21: mol_type = other RNA
  modified_base 1: mod_base = OTHER; note = 5'-deoxy-5'-(N-morpholinyl)-2'-O,4'-C-methylene uridine-3'-phosphate
  modified_base 2: mod_base = OTHER; note = 2'-O-methylguanosine-3'-phosphorothioate
  modified_base 3: mod_base = OTHER; note = 2'-deoxy-2'-fluorouridine-3'-phosphate
  modified_base 4: mod_base = OTHER; note = 2'-O-methylguanosine-3'-phosphate
  modified_base 5: mod_base = OTHER; note = 2'-deoxy-2'-fluoroadenosine-3'-phosphate
  modified_base 6: mod_base = OTHER; note = 2'-O-methylcytidine-3'-phosphate
  modified_base 7: mod_base = OTHER; note = 2'-deoxy-2'-fluoroadenosine-3'-phosphate
  modified_base 8: mod_base = OTHER; note = 2'-O-methyladenosine-3'-phosphate
  modified_base 9: mod_base = OTHER; note = 2'-deoxy-2'-fluoroadenosine-3'-phosphate
  modified_base 10: mod_base = OTHER; note = 2'-deoxy-2'-fluorouridine-3'-phosphate
  modified_base 11: mod_base = OTHER; note = 2'-deoxy-2'-fluoroadenosine-3'-phosphate
  modified_base 12: mod_base = OTHER; note = 2'-O-methyluridine-3'-phosphate
  modified_base 13: mod_base = OTHER; note = 2'-deoxy-2'-fluoroguanosine-3'-phosphate
  modified_base 14: mod_base = OTHER; note = 2'-O-methylguanosine-3'-phosphate
  modified_base 15: mod_base = OTHER; note = 2'-deoxy-2'-fluoroguanosine-3'-phosphate
  modified_base 16: mod_base = OTHER; note = 2'-O-methylcytidine-3'-phosphate
  modified_base 17: mod_base = OTHER; note = 2'-deoxy-2'-fluoroadenosine-3'-phosphate
  modified_base 18: mod_base = OTHER; note = 2'-O-methyluridine-3'-phosphate
  modified_base 19: mod_base = OTHER; note = 2'-deoxy-2'-fluorocytidine-3'-phosphate
  modified_base 20: mod_base = OTHER; note = 2'-O-methyladenosine-3'-phosphate
  modified_base 21: mod_base = OTHER; note = 2'-deoxy-2'-fluoroadenosine-3'-phosphate ((2S,4R)-1-[29-[[2-(acetylamino)-2-deoxy-beta-D-galactopyra nosyl]oxy]-14,14-bis[[3-[[3-[[5-[[2-(acetylamino)-2-deoxy-b eta-D-galactopyranosyl]oxy]-1-oxopentyl]amino]propyl]amino] -3-oxopropoxy]methyl]-1,12,19,25-tetraoxo-16-oxa-13,20,24-t riazanonacos-1-yl]-4-hydroxy-2-pyrrolidinyl)methyl ester
tgtgacaaatatgggcatcaa

SEQ ID NO: 317 - RNA, 23 nt, synthetic construct
  source 1..23: mol_type = other RNA
  modified_base 1: mod_base = OTHER; note = 2'-O-methyluridine-3'-phosphorothioate 5'-(E)-Vinylphosphonate
  modified_base 2: mod_base = OTHER; note = 2'-deoxy-2'-fluorouridine-3'-phosphorothioate
  modified_base 3: mod_base = OTHER; note = 2'-O-methylguanosine-3'-phosphate
  modified_base 4: mod_base = OTHER; note = 2'-deoxy-2'-fluoroadenosine-3'-phosphate
  modified_base 5: mod_base = OTHER; note = 2'-O-methyluridine-3'-phosphate
  modified_base 6: mod_base = OTHER; note = 2'-deoxy-2'-fluoroguanosine-3'-phosphate
  modified_base 7: mod_base = OTHER; note = 2'-O-methylcytidine-3'-phosphate
  modified_base 8: mod_base = OTHER; note = 2'-deoxy-2'-fluorocytidine-3'-phosphate
  modified_base 9: mod_base = OTHER; note = 2'-O-methylcytidine-3'-phosphate
  modified_base 10: mod_base = OTHER; note = 2'-deoxy-2'-fluoroadenosine-3'-phosphate
  modified_base 11: mod_base = OTHER; note = 2'-O-methyluridine-3'-phosphate
  modified_base 12: mod_base = OTHER; note = 2'-O-methyladenosine-3'-phosphate
  modified_base 13: mod_base = OTHER; note = 2'-O-methyluridine-3'-phosphate
  modified_base 14: mod_base = OTHER; note = 2'-deoxy-2'-fluorouridine-3'-phosphate
  modified_base 15: mod_base = OTHER; note = 2'-O-methyluridine-3'-phosphate
  modified_base 16: mod_base = OTHER; note = 2'-deoxy-2'-fluoroguanosine-3'-phosphate
  modified_base 17: mod_base = OTHER; note = 2'-O-methyluridine-3'-phosphate
  modified_base 18: mod_base = OTHER; note = 2'-deoxy-2'-fluorocytidine-3'-phosphate
  modified_base 19: mod_base = OTHER; note = 2'-O-methyladenosine-3'-phosphate
  modified_base 20: mod_base = OTHER; note = 2'-deoxy-2'-fluorocytidine-3'-phosphate
  modified_base 21: mod_base = OTHER; note = 2'-O-methyladenosine-3'-phosphorothioate
  modified_base 22: mod_base = OTHER; note = 2'-O-methyladenosine-3'-phosphorothioate
  modified_base 23: mod_base = OTHER; note = 2'-O-methyladenosine
ttgatgcccatatttgtcacaaa

SEQ ID NO: 318 - RNA, 21 nt, synthetic construct
  source 1..21: mol_type = other RNA
  modified_base 1: mod_base = OTHER; note = 5'-deoxy-5'-(N-morpholinyl)-2'-O,4'-C-methylene uridine-3'-phosphorothioate
  modified_base 2: mod_base = OTHER; note = 2'-O-methylguanosine-3'-phosphorothioate
  modified_base 3: mod_base = OTHER; note = 2'-deoxy-2'-fluorouridine-3'-phosphate
  modified_base 4: mod_base = OTHER; note = 2'-O-methylguanosine-3'-phosphate
  modified_base 5: mod_base = OTHER; note = 2'-deoxy-2'-fluoroadenosine-3'-phosphate
  modified_base 6: mod_base = OTHER; note = 2'-O-methylcytidine-3'-phosphate
  modified_base 7: mod_base = OTHER; note = 2'-deoxy-2'-fluoroadenosine-3'-phosphate
  modified_base 8: mod_base = OTHER; note = 2'-O-methyladenosine-3'-phosphate
  modified_base 9: mod_base = OTHER; note = 2'-deoxy-2'-fluoroadenosine-3'-phosphate
  modified_base 10: mod_base = OTHER; note = 2'-deoxy-2'-fluorouridine-3'-phosphate
  modified_base 11: mod_base = OTHER; note = 2'-deoxy-2'-fluoroadenosine-3'-phosphate
  modified_base 12: mod_base = OTHER; note = 2'-O-methyluridine-3'-phosphate
  modified_base 13: mod_base = OTHER; note = 2'-deoxy-2'-fluoroguanosine-3'-phosphate
  modified_base 14: mod_base = OTHER; note = 2'-O-methylguanosine-3'-phosphate
  modified_base 15: mod_base = OTHER; note = 2'-deoxy-2'-fluoroguanosine-3'-phosphate
  modified_base 16: mod_base = OTHER; note = 2'-O-methylcytidine-3'-phosphate
  modified_base 17: mod_base = OTHER; note = 2'-deoxy-2'-fluoroadenosine-3'-phosphate
  modified_base 18: mod_base = OTHER; note = 2'-O-methyluridine-3'-phosphate
  modified_base 19: mod_base = OTHER; note = 2'-deoxy-2'-fluorocytidine-3'-phosphate
  modified_base 20: mod_base = OTHER; note = 2'-O-methyladenosine-3'-phosphate
  modified_base 21: mod_base = OTHER; note = 2'-deoxy-2'-fluoroadenosine-3'-phosphate ((2S,4R)-1-[29-[[2-(acetylamino)-2-deoxy-beta-D-galactopyra nosyl]oxy]-14,14-bis[[3-[[3-[[5-[[2-(acetylamino)-2-deoxy-b eta-D-galactopyranosyl]oxy]-1-oxopentyl]amino]propyl]amino] -3-oxopropoxy]methyl]-1,12,19,25-tetraoxo-16-oxa-13,20,24-t riazanonacos-1-yl]-4-hydroxy-2-pyrrolidinyl)methyl ester
tgtgacaaatatgggcatcaa

SEQ ID NO: 319 - RNA, 23 nt, synthetic construct
  source 1..23: mol_type = other RNA
  modified_base 1: mod_base = OTHER; note = 2'-O-methyluridine-3'-phosphorothioate 5'-(E)-Vinylphosphonate
  modified_base 2: mod_base = OTHER; note = 2'-deoxy-2'-fluorouridine-3'-phosphorothioate
  modified_base 3: mod_base = OTHER; note = 2'-O-methylguanosine-3'-phosphate
  modified_base 4: mod_base = OTHER; note = 2'-deoxy-2'-fluoroadenosine-3'-phosphate
  modified_base 5: mod_base = OTHER; note = 2'-O-methyluridine-3'-phosphate
  modified_base 6: mod_base = OTHER; note = 2'-deoxy-2'-fluoroguanosine-3'-phosphate
  modified_base 7: mod_base = OTHER; note = 2'-O-methylcytidine-3'-phosphate
  modified_base 8: mod_base = OTHER; note = 2'-deoxy-2'-fluorocytidine-3'-phosphate
  modified_base 9: mod_base = OTHER; note = 2'-O-methylcytidine-3'-phosphate
  modified_base 10: mod_base = OTHER; note = 2'-deoxy-2'-fluoroadenosine-3'-phosphate
  modified_base 11: mod_base = OTHER; note = 2'-O-methyluridine-3'-phosphate
  modified_base 12: mod_base = OTHER; note = 2'-O-methyladenosine-3'-phosphate
  modified_base 13: mod_base = OTHER; note = 2'-O-methyluridine-3'-phosphate
  modified_base 14: mod_base = OTHER; note = 2'-deoxy-2'-fluorouridine-3'-phosphate
  modified_base 15: mod_base = OTHER; note = 2'-O-methyluridine-3'-phosphate
  modified_base 16: mod_base = OTHER; note = 2'-deoxy-2'-fluoroguanosine-3'-phosphate
  modified_base 17: mod_base = OTHER; note = 2'-O-methyluridine-3'-phosphate
  modified_base 18: mod_base = OTHER; note = 2'-deoxy-2'-fluorocytidine-3'-phosphate
  modified_base 19: mod_base = OTHER; note = 2'-O-methyladenosine-3'-phosphate
  modified_base 20: mod_base = OTHER; note = 2'-deoxy-2'-fluorocytidine-3'-phosphate
  modified_base 21: mod_base = OTHER; note = 2'-O-methyladenosine-3'-phosphorothioate
  modified_base 22: mod_base = OTHER; note = 2'-O-methyladenosine-3'-phosphorothioate
  modified_base 23: mod_base = OTHER; note = 2'-O-methyladenosine
ttgatgcccatatttgtcacaaa

SEQ ID NO: 320 - RNA, 21 nt, synthetic construct
  source 1..21: mol_type = other RNA
  modified_base 1: mod_base = OTHER; note = 5'-deoxy-5'-(N-morpholinyl)-2'-O,4'-C-methylene uridine-3'-phosphorothioate
  modified_base 2: mod_base = OTHER; note = 2'-O-methylguanosine-3'-phosphorothioate
  modified_base 3: mod_base = OTHER; note = 2'-deoxy-2'-fluorouridine-3'-phosphate
  modified_base 4: mod_base = OTHER; note = 2'-O-methylguanosine-3'-phosphate
  modified_base 5: mod_base = OTHER; note = 2'-deoxy-2'-fluoroadenosine-3'-phosphate
  modified_base 6: mod_base = OTHER; note = 2'-O-methylcytidine-3'-phosphate
  modified_base 7: mod_base = OTHER; note = 2'-deoxy-2'-fluoroadenosine-3'-phosphate
  modified_base 8: mod_base = OTHER; note = 2'-O-methyladenosine-3'-phosphate
  modified_base 9: mod_base = OTHER; note = 2'-deoxy-2'-fluoroadenosine-3'-phosphate
  modified_base 10: mod_base = OTHER; note = 2'-deoxy-2'-fluorouridine-3'-phosphate
  modified_base 11: mod_base = OTHER; note = 2'-deoxy-2'-fluoroadenosine-3'-phosphate
  modified_base 12: mod_base = OTHER; note = 2'-O-methyluridine-3'-phosphate
  modified_base 13: mod_base = OTHER; note = 2'-deoxy-2'-fluoroguanosine-3'-phosphate
  modified_base 14: mod_base = OTHER; note = 2'-O-methylguanosine-3'-phosphate
  modified_base 15: mod_base = OTHER; note = 2'-deoxy-2'-fluoroguanosine-3'-phosphate
  modified_base 16: mod_base = OTHER; note = 2'-O-methylcytidine-3'-phosphate
  modified_base 17: mod_base = OTHER; note = 2'-deoxy-2'-fluoroadenosine-3'-phosphate
  modified_base 18: mod_base = OTHER; note = 2'-O-methyluridine-3'-phosphate
  modified_base 19: mod_base = OTHER; note = 2'-deoxy-2'-fluorocytidine-3'-phosphate
  modified_base 20: mod_base = OTHER; note = 2'-O-methyladenosine-3'-phosphate
  modified_base 21: mod_base = OTHER; note = 2'-deoxy-2'-fluoroadenosine-3'-phosphate ((2S,4R)-1-[29-[[2-(acetylamino)-2-deoxy-beta-D-galactopyra nosyl]oxy]-14,14-bis[[3-[[3-[[5-[[2-(acetylamino)-2-deoxy-b eta-D-galactopyranosyl]oxy]-1-oxopentyl]amino]propyl]amino] -3-oxopropoxy]methyl]-1,12,19,25-tetraoxo-16-oxa-13,20,24-t riazanonacos-1-yl]-4-hydroxy-2-pyrrolidinyl)methyl ester
tgtgacaaatatgggcatcaa

SEQ ID NO: 321 - RNA, 23 nt, synthetic construct
  source 1..23: mol_type = other RNA
  modified_base 1: mod_base = OTHER; note = 2'-O-methyluridine-3'-phosphorothioate
  modified_base 2: mod_base = OTHER; note = 2'-deoxy-2'-fluorouridine-3'-phosphorothioate
  modified_base 3: mod_base = OTHER; note = 2'-O-methylguanosine-3'-phosphate
  modified_base 4: mod_base = OTHER; note = 2'-deoxy-2'-fluoroadenosine-3'-phosphate
  modified_base 5: mod_base = OTHER; note = 2'-O-methyluridine-3'-phosphate
  modified_base 6: mod_base = OTHER; note = 2'-deoxy-2'-fluoroguanosine-3'-phosphate
  modified_base 7: mod_base = OTHER; note = 2'-O-methylcytidine-3'-phosphate
  modified_base 8: mod_base = OTHER; note = 2'-deoxy-2'-fluorocytidine-3'-phosphate
  modified_base 9: mod_base = OTHER; note = 2'-O-methylcytidine-3'-phosphate
  modified_base 10: mod_base = OTHER; note = 2'-deoxy-2'-fluoroadenosine-3'-phosphate
  modified_base 11: mod_base = OTHER; note = 2'-O-methyluridine-3'-phosphate
  modified_base 12: mod_base = OTHER; note = 2'-O-methyladenosine-3'-phosphate
  modified_base 13: mod_base = OTHER; note = 2'-O-methyluridine-3'-phosphate
  modified_base 14: mod_base = OTHER; note = 2'-deoxy-2'-fluorouridine-3'-phosphate
  modified_base 15: mod_base = OTHER; note = 2'-O-methyluridine-3'-phosphate
  modified_base 16: mod_base = OTHER; note = 2'-deoxy-2'-fluoroguanosine-3'-phosphate
  modified_base 17: mod_base = OTHER; note = 2'-O-methyluridine-3'-phosphate
  modified_base 18: mod_base = OTHER; note = 2'-deoxy-2'-fluorocytidine-3'-phosphate
  modified_base 19: mod_base = OTHER; note = 2'-O-methyladenosine-3'-phosphate
  modified_base 20: mod_base = OTHER; note = 2'-deoxy-2'-fluorocytidine-3'-phosphate
  modified_base 21: mod_base = OTHER; note = 2'-O-methyladenosine-3'-phosphorothioate
  modified_base 22: mod_base = OTHER; note = 2'-O-methyladenosine-3'-phosphorothioate
  modified_base 23: mod_base = OTHER; note = 2'-O-methyladenosine
ttgatgcccatatttgtcacaaa

SEQ ID NO: 322 - RNA, 21 nt, synthetic construct
  source 1..21: mol_type = other RNA
  modified_base 1: mod_base = OTHER; note = 5'-deoxy-5'-(N-morpholinyl)-2'-O,4'-C-methylene uridine-3'-phosphate
  modified_base 2: mod_base = OTHER; note = 2'-O-methylguanosine-3'-phosphate
  modified_base 3: mod_base = OTHER; note = 2'-deoxy-2'-fluorouridine-3'-phosphate
  modified_base 4: mod_base = OTHER; note = 2'-O-methylguanosine-3'-phosphate
  modified_base 5: mod_base = OTHER; note = 2'-deoxy-2'-fluoroadenosine-3'-phosphate
  modified_base 6: mod_base = OTHER; note = 2'-O-methylcytidine-3'-phosphate
  modified_base 7: mod_base = OTHER; note = 2'-deoxy-2'-fluoroadenosine-3'-phosphate
  modified_base 8: mod_base = OTHER; note = 2'-O-methyladenosine-3'-phosphate
  modified_base 9: mod_base = OTHER; note = 2'-deoxy-2'-fluoroadenosine-3'-phosphate
  modified_base 10: mod_base = OTHER; note = 2'-deoxy-2'-fluorouridine-3'-phosphate
  modified_base 11: mod_base = OTHER; note = 2'-deoxy-2'-fluoroadenosine-3'-phosphate
  modified_base 12: mod_base = OTHER; note = 2'-O-methyluridine-3'-phosphate
  modified_base 13: mod_base = OTHER; note = 2'-deoxy-2'-fluoroguanosine-3'-phosphate
  modified_base 14: mod_base = OTHER; note = 2'-O-methylguanosine-3'-phosphate
  modified_base 15: mod_base = OTHER; note = 2'-deoxy-2'-fluoroguanosine-3'-phosphate
  modified_base 16: mod_base = OTHER; note = 2'-O-methylcytidine-3'-phosphate
  modified_base 17: mod_base = OTHER; note = 2'-deoxy-2'-fluoroadenosine-3'-phosphate
  modified_base 18: mod_base = OTHER; note = 2'-O-methyluridine-3'-phosphate
  modified_base 19: mod_base = OTHER; note = 2'-deoxy-2'-fluorocytidine-3'-phosphate
  modified_base 20: mod_base = OTHER; note = 2'-O-methyladenosine-3'-phosphate
  modified_base 21: mod_base = OTHER; note = 2'-deoxy-2'-fluoroadenosine-3'-phosphate ((2S,4R)-1-[29-[[2-(acetylamino)-2-deoxy-beta-D-galactopyra nosyl]oxy]-14,14-bis[[3-[[3-[[5-[[2-(acetylamino)-2-deoxy-b eta-D-galactopyranosyl]oxy]-1-oxopentyl]amino]propyl]amino] -3-oxopropoxy]methyl]-1,12,19,25-tetraoxo-16-oxa-13,20,24-t riazanonacos-1-yl]-4-hydroxy-2-pyrrolidinyl)methyl ester
tgtgacaaatatgggcatcaa

SEQ ID NO: 323 - RNA, 23 nt, synthetic construct
  source 1..23: mol_type = other RNA
  modified_base 1: mod_base = OTHER; note = 2'-O-methyluridine-3'-phosphorothioate 5'-(E)-Vinylphosphonate
  modified_base 2: mod_base = OTHER; note = 2'-deoxy-2'-fluorouridine-3'-phosphorothioate
  modified_base 3: mod_base = OTHER; note = 2'-O-methylguanosine-3'-phosphate
  modified_base 4: mod_base = OTHER; note = 2'-deoxy-2'-fluoroadenosine-3'-phosphate
  modified_base 5: mod_base = OTHER; note = 2'-O-methyluridine-3'-phosphate
  modified_base 6: mod_base = OTHER; note = 2'-deoxy-2'-fluoroguanosine-3'-phosphate
  modified_base 7: mod_base = OTHER; note = 2'-O-methylcytidine-3'-phosphate
  modified_base 8: mod_base = OTHER; note = 2'-deoxy-2'-fluorocytidine-3'-phosphate
  modified_base 9: mod_base = OTHER; note = 2'-O-methylcytidine-3'-phosphate
  modified_base 10: mod_base = OTHER; note = 2'-deoxy-2'-fluoroadenosine-3'-phosphate
  modified_base 11: mod_base = OTHER; note = 2'-O-methyluridine-3'-phosphate
  modified_base 12: mod_base = OTHER; note = 2'-O-methyladenosine-3'-phosphate
  modified_base 13: mod_base = OTHER; note = 2'-O-methyluridine-3'-phosphate
  modified_base 14: mod_base = OTHER; note = 2'-deoxy-2'-fluorouridine-3'-phosphate
  modified_base 15: mod_base = OTHER; note = 2'-O-methyluridine-3'-phosphate
  modified_base 16: mod_base = OTHER; note = 2'-deoxy-2'-fluoroguanosine-3'-phosphate
  modified_base 17: mod_base = OTHER; note = 2'-O-methyluridine-3'-phosphate
  modified_base 18: mod_base = OTHER; note = 2'-deoxy-2'-fluorocytidine-3'-phosphate
  modified_base 19: mod_base = OTHER; note = 2'-O-methyladenosine-3'-phosphate
  modified_base 20: mod_base = OTHER; note = 2'-deoxy-2'-fluorocytidine-3'-phosphate
  modified_base 21: mod_base = OTHER; note = 2'-O-methyladenosine-3'-phosphorothioate
  modified_base 22: mod_base = OTHER; note = 2'-O-methyladenosine-3'-phosphorothioate
  modified_base 23: mod_base = OTHER; note = 2'-O-methyladenosine
ttgatgcccatatttgtcacaaa

SEQ ID NO: 324 - RNA, 21 nt, synthetic construct
  source 1..21: mol_type = other RNA
  modified_base 1: mod_base = OTHER; note = 5'-deoxy-5'-(N-morpholinyl)-2'-O,4'-C-methylene uridine-3'-phosphorothioate
  modified_base 2: mod_base = OTHER; note = 2'-O-methylguanosine-3'-phosphate
  modified_base 3: mod_base = OTHER; note = 2'-deoxy-2'-fluorouridine-3'-phosphate
  modified_base 4: mod_base = OTHER; note = 2'-O-methylguanosine-3'-phosphate
  modified_base 5: mod_base = OTHER; note = 2'-deoxy-2'-fluoroadenosine-3'-phosphate
  modified_base 6: mod_base = OTHER; note = 2'-O-methylcytidine-3'-phosphate
  modified_base 7: mod_base = OTHER; note = 2'-deoxy-2'-fluoroadenosine-3'-phosphate
  modified_base 8: mod_base = OTHER; note = 2'-O-methyladenosine-3'-phosphate
  modified_base 9: mod_base = OTHER; note = 2'-deoxy-2'-fluoroadenosine-3'-phosphate
  modified_base 10: mod_base = OTHER; note = 2'-deoxy-2'-fluorouridine-3'-phosphate
  modified_base 11: mod_base = OTHER; note = 2'-deoxy-2'-fluoroadenosine-3'-phosphate
  modified_base 12: mod_base = OTHER; note = 2'-O-methyluridine-3'-phosphate
  modified_base 13: mod_base = OTHER; note = 2'-deoxy-2'-fluoroguanosine-3'-phosphate
  modified_base 14: mod_base = OTHER; note = 2'-O-methylguanosine-3'-phosphate
  modified_base 15: mod_base = OTHER; note = 2'-deoxy-2'-fluoroguanosine-3'-phosphate
  modified_base 16: mod_base = OTHER; note = 2'-O-methylcytidine-3'-phosphate
  modified_base 17: mod_base = OTHER; note = 2'-deoxy-2'-fluoroadenosine-3'-phosphate
  modified_base 18: mod_base = OTHER; note = 2'-O-methyluridine-3'-phosphate
  modified_base 19: mod_base = OTHER; note = 2'-deoxy-2'-fluorocytidine-3'-phosphate
  modified_base 20: mod_base = OTHER; note = 2'-O-methyladenosine-3'-phosphate
  modified_base 21: mod_base = OTHER; note = 2'-deoxy-2'-fluoroadenosine-3'-phosphate ((2S,4R)-1-[29-[[2-(acetylamino)-2-deoxy-beta-D-galactopyra nosyl]oxy]-14,14-bis[[3-[[3-[[5-[[2-(acetylamino)-2-deoxy-b eta-D-galactopyranosyl]oxy]-1-oxopentyl]amino]propyl]amino] -3-oxopropoxy]methyl]-1,12,19,25-tetraoxo-16-oxa-13,20,24-t riazanonacos-1-yl]-4-hydroxy-2-pyrrolidinyl)methyl ester
tgtgacaaatatgggcatcaa

SEQ ID NO: 325 - RNA, 23 nt, synthetic construct
  source 1..23: mol_type = other RNA
  modified_base 1: mod_base = OTHER; note = 2'-O-methyluridine-3'-phosphorothioate 5'-(E)-Vinylphosphonate
  modified_base 2: mod_base = OTHER; note = 2'-deoxy-2'-fluorouridine-3'-phosphorothioate
  modified_base 3: mod_base = OTHER; note = 2'-O-methylguanosine-3'-phosphate
  modified_base 4: mod_base = OTHER; note = 2'-deoxy-2'-fluoroadenosine-3'-phosphate
  modified_base 5: mod_base = OTHER; note = 2'-O-methyluridine-3'-phosphate
  modified_base 6: mod_base = OTHER; note = 2'-deoxy-2'-fluoroguanosine-3'-phosphate
  modified_base 7: mod_base = OTHER; note = 2'-O-methylcytidine-3'-phosphate
  modified_base 8: mod_base = OTHER; note = 2'-deoxy-2'-fluorocytidine-3'-phosphate
  modified_base 9: mod_base = OTHER; note = 2'-O-methylcytidine-3'-phosphate
  modified_base 10: mod_base = OTHER; note = 2'-deoxy-2'-fluoroadenosine-3'-phosphate
  modified_base 11: mod_base = OTHER; note = 2'-O-methyluridine-3'-phosphate
  modified_base 12: mod_base = OTHER; note = 2'-O-methyladenosine-3'-phosphate
  modified_base 13: mod_base = OTHER; note = 2'-O-methyluridine-3'-phosphate
  modified_base 14: mod_base = OTHER; note = 2'-deoxy-2'-fluorouridine-3'-phosphate
  modified_base 15: mod_base = OTHER; note = 2'-O-methyluridine-3'-phosphate
  modified_base 16: mod_base = OTHER; note = 2'-deoxy-2'-fluoroguanosine-3'-phosphate
  modified_base 17: mod_base = OTHER; note = 2'-O-methyluridine-3'-phosphate
  modified_base 18: mod_base = OTHER; note = 2'-deoxy-2'-fluorocytidine-3'-phosphate
  modified_base 19: mod_base = OTHER; note = 2'-O-methyladenosine-3'-phosphate
  modified_base 20: mod_base = OTHER; note = 2'-deoxy-2'-fluorocytidine-3'-phosphate
  modified_base 21: mod_base = OTHER; note = 2'-O-methyladenosine-3'-phosphorothioate
  modified_base 22: mod_base = OTHER; note = 2'-O-methyladenosine-3'-phosphorothioate
  modified_base 23: mod_base = OTHER; note = 2'-O-methyladenosine
ttgatgcccatatttgtcacaaa

SEQ ID NO: 326 - RNA, 21 nt, synthetic construct
  source 1..21: mol_type = other RNA
  modified_base 1: mod_base = OTHER; note = 2'-O,4'-C-methylene adenosine-3'-phosphorothioate
  modified_base 2: mod_base = OTHER; note = 2'-O-methyladenosine-3'-phosphorothioate
  modified_base 3: mod_base = OTHER; note = 2'-deoxy-2'-fluorocytidine-3'-phosphate
  modified_base 4: mod_base = OTHER; note = 2'-O-methyladenosine-3'-phosphate
  modified_base 5: mod_base = OTHER; note = 2'-deoxy-2'-fluoroguanosine-3'-phosphate
  modified_base 6: mod_base = OTHER; note = 2'-O-methyluridine-3'-phosphate
  modified_base 7: mod_base = OTHER; note = 2'-deoxy-2'-fluoroguanosine-3'-phosphate
  modified_base 8: mod_base = OTHER; note = 2'-O-methyluridine-3'-phosphate
  modified_base 9: mod_base = OTHER; note = 2'-deoxy-2'-fluorouridine-3'-phosphate
  modified_base 10: mod_base = OTHER; note = 2'-deoxy-2'-fluorocytidine-3'-phosphate
  modified_base 11: mod_base = OTHER; note = 2'-deoxy-2'-fluorouridine-3'-phosphate
  modified_base 12: mod_base = OTHER; note = 2'-O-methyluridine-3'-phosphate
  modified_base 13: mod_base = OTHER; note = 2'-deoxy-2'-fluoroguanosine-3'-phosphate
  modified_base 14: mod_base = OTHER; note = 2'-O-methylcytidine-3'-phosphate
  modified_base 15: mod_base = OTHER; note = 2'-deoxy-2'-fluorouridine-3'-phosphate
  modified_base 16: mod_base = OTHER; note = 2'-O-methylcytidine-3'-phosphate
  modified_base 17: mod_base = OTHER; note = 2'-deoxy-2'-fluorouridine-3'-phosphate
  modified_base 18: mod_base = OTHER; note = 2'-O-methyladenosine-3'-phosphate
  modified_base 19: mod_base = OTHER; note = 2'-deoxy-2'-fluorouridine-3'-phosphate
  modified_base 20: mod_base = OTHER; note = 2'-O-methyladenosine-3'-phosphate
  modified_base 21: mod_base = OTHER; note = 2'-deoxy-2'-fluoroadenosine-3'-phosphate ((2S,4R)-1-[29-[[2-(acetylamino)-2-deoxy-beta-D-galactopyra nosyl]oxy]-14,14-bis[[3-[[3-[[5-[[2-(acetylamino)-2-deoxy-b eta-D-galactopyranosyl]oxy]-1-oxopentyl]amino]propyl]amino] -3-oxopropoxy]methyl]-1,12,19,25-tetraoxo-16-oxa-13,20,24-t riazanonacos-1-yl]-4-hydroxy-2-pyrrolidinyl)methyl ester
aacagtgttcttgctctataa

SEQ ID NO: 327 - RNA, 23 nt, synthetic construct
  source 1..23: mol_type = other RNA
  modified_base 1: mod_base = OTHER; note = 2'-O-methyluridine-3'-phosphorothioate 5'-(E)-Vinylphosphonate
  modified_base 2: mod_base = OTHER; note = 2'-deoxy-2'-fluorouridine-3'-phosphorothioate
  modified_base 3: mod_base = OTHER; note = 2'-O-methyladenosine-3'-phosphate
  modified_base 4: mod_base = OTHER; note = 2'-deoxy-2'-fluorouridine-3'-phosphate
  modified_base 5: mod_base = OTHER; note = 2'-O-methyladenosine-3'-phosphate
  modified_base 6: mod_base = OTHER; note = 2'-deoxy-2'-fluoroguanosine-3'-phosphate
  modified_base 7: mod_base = OTHER; note = 2'-O-methyladenosine-3'-phosphate
  modified_base 8: mod_base = OTHER; note = 2'-deoxy-2'-fluoroguanosine-3'-phosphate
  modified_base 9: mod_base = OTHER; note = 2'-O-methylcytidine-3'-phosphate
  modified_base 10: mod_base = OTHER; note = 2'-deoxy-2'-fluoroadenosine-3'-phosphate
  modified_base 11: mod_base = OTHER; note = 2'-O-methyladenosine-3'-phosphate
  modified_base 12: mod_base = OTHER; note = 2'-O-methylguanosine-3'-phosphate
  modified_base 13: mod_base = OTHER; note = 2'-O-methyladenosine-3'-phosphate
  modified_base 14: mod_base = OTHER; note = 2'-deoxy-2'-fluoroadenosine-3'-phosphate
  modified_base 15: mod_base = OTHER; note = 2'-O-methylcytidine-3'-phosphate
  modified_base 16: mod_base = OTHER; note = 2'-deoxy-2'-fluoroadenosine-3'-phosphate
  modified_base 17: mod_base = OTHER; note = 2'-O-methylcytidine-3'-phosphate
  modified_base 18: mod_base = OTHER; note = 2'-deoxy-2'-fluorouridine-3'-phosphate
  modified_base 19: mod_base = OTHER; note = 2'-O-methylguanosine-3'-phosphate
  modified_base 20: mod_base = OTHER; note = 2'-deoxy-2'-fluorouridine-3'-phosphate
  modified_base 21: mod_base = OTHER; note = 2'-O-methyluridine-3'-phosphorothioate
  modified_base 22: mod_base = OTHER; note = 2'-O-methyluridine-3'-phosphorothioate
  modified_base 23: mod_base = OTHER; note = 2'-O-methyluridine
ttatagagcaagaacactgtttt

SEQ ID NO: 328 - RNA, 21 nt, synthetic construct
  source 1..21: mol_type = other RNA
  modified_base 1: mod_base = OTHER; note = 2'-O,4'-C-methylene adenosine-3'-phosphate
  modified_base 2: mod_base = OTHER; note = 2'-O-methyladenosine-3'-phosphorothioate
  modified_base 3: mod_base = OTHER; note = 2'-deoxy-2'-fluorocytidine-3'-phosphate
  modified_base 4: mod_base = OTHER; note = 2'-O-methyladenosine-3'-phosphate
  modified_base 5: mod_base = OTHER; note = 2'-deoxy-2'-fluoroguanosine-3'-phosphate
  modified_base 6: mod_base = OTHER; note = 2'-O-methyluridine-3'-phosphate
  modified_base 7: mod_base = OTHER; note = 2'-deoxy-2'-fluoroguanosine-3'-phosphate
  modified_base 8: mod_base = OTHER; note = 2'-O-methyluridine-3'-phosphate
  modified_base 9: mod_base = OTHER; note = 2'-deoxy-2'-fluorouridine-3'-phosphate
  modified_base 10: mod_base = OTHER; note = 2'-deoxy-2'-fluorocytidine-3'-phosphate
  modified_base 11: mod_base = OTHER; note = 2'-deoxy-2'-fluorouridine-3'-phosphate
  modified_base 12: mod_base = OTHER; note = 2'-O-methyluridine-3'-phosphate
  modified_base 13: mod_base = OTHER; note = 2'-deoxy-2'-fluoroguanosine-3'-phosphate
  modified_base 14: mod_base = OTHER; note = 2'-O-methylcytidine-3'-phosphate
  modified_base 15: mod_base = OTHER; note = 2'-deoxy-2'-fluorouridine-3'-phosphate
  modified_base 16: mod_base = OTHER; note = 2'-O-methylcytidine-3'-phosphate
  modified_base 17: mod_base = OTHER; note = 2'-deoxy-2'-fluorouridine-3'-phosphate
  modified_base 18: mod_base = OTHER; note = 2'-O-methyladenosine-3'-phosphate
  modified_base 19: mod_base = OTHER; note = 2'-deoxy-2'-fluorouridine-3'-phosphate
  modified_base 20: mod_base = OTHER; note = 2'-O-methyladenosine-3'-phosphate
  modified_base 21: mod_base = OTHER; note = 2'-deoxy-2'-fluoroadenosine-3'-phosphate ((2S,4R)-1-[29-[[2-(acetylamino)-2-deoxy-beta-D-galactopyra nosyl]oxy]-14,14-bis[[3-[[3-[[5-[[2-(acetylamino)-2-deoxy-b eta-D-galactopyranosyl]oxy]-1-oxopentyl]amino]propyl]amino] -3-oxopropoxy]methyl]-1,12,19,25-tetraoxo-16-oxa-13,20,24-t riazanonacos-1-yl]-4-hydroxy-2-pyrrolidinyl)methyl ester
aacagtgttcttgctctataa

SEQ ID NO: 329 - RNA, 23 nt, synthetic construct
  source 1..23: mol_type = other RNA
  modified_base 1: mod_base = OTHER; note = 2'-O-methyluridine-3'-phosphorothioate 5'-(E)-Vinylphosphonate
  modified_base 2: mod_base = OTHER; note = 2'-deoxy-2'-fluorouridine-3'-phosphorothioate
  modified_base 3: mod_base = OTHER; note = 2'-O-methyladenosine-3'-phosphate
  modified_base 4: mod_base = OTHER; note = 2'-deoxy-2'-fluorouridine-3'-phosphate
  modified_base 5: mod_base = OTHER; note = 2'-O-methyladenosine-3'-phosphate
  modified_base 6: mod_base = OTHER; note = 2'-deoxy-2'-fluoroguanosine-3'-phosphate
  modified_base 7: mod_base = OTHER; note = 2'-O-methyladenosine-3'-phosphate
  modified_base 8: mod_base = OTHER; note = 2'-deoxy-2'-fluoroguanosine-3'-phosphate
  modified_base 9: mod_base = OTHER; note = 2'-O-methylcytidine-3'-phosphate
  modified_base 10: mod_base = OTHER; note = 2'-deoxy-2'-fluoroadenosine-3'-phosphate
  modified_base 11: mod_base = OTHER; note = 2'-O-methyladenosine-3'-phosphate
  modified_base 12: mod_base = OTHER; note = 2'-O-methylguanosine-3'-phosphate
  modified_base 13: mod_base = OTHER; note = 2'-O-methyladenosine-3'-phosphate
  modified_base 14: mod_base = OTHER; note = 2'-deoxy-2'-fluoroadenosine-3'-phosphate
  modified_base 15: mod_base = OTHER; note = 2'-O-methylcytidine-3'-phosphate
  modified_base 16: mod_base = OTHER; note = 2'-deoxy-2'-fluoroadenosine-3'-phosphate
  modified_base 17: mod_base = OTHER; note = 2'-O-methylcytidine-3'-phosphate
  modified_base 18: mod_base = OTHER; note = 2'-deoxy-2'-fluorouridine-3'-phosphate
  modified_base 19: mod_base = OTHER; note = 2'-O-methylguanosine-3'-phosphate
  modified_base 20: mod_base = OTHER; note = 2'-deoxy-2'-fluorouridine-3'-phosphate
  modified_base 21: mod_base = OTHER; note = 2'-O-methyluridine-3'-phosphorothioate
  modified_base 22: mod_base = OTHER; note = 2'-O-methyluridine-3'-phosphorothioate
  modified_base 23: mod_base = OTHER; note = 2'-O-methyluridine
ttatagagcaagaacactgtttt

SEQ ID NO: 330 - RNA, 21 nt, synthetic construct
  source 1..21: mol_type = other RNA
  modified_base 1: mod_base = OTHER; note = 2'-O,4'-C-methylene adenosine-3'-phosphate
  modified_base 2: mod_base = OTHER; note = 2'-O-methyladenosine-3'-phosphate
  modified_base 3: mod_base = OTHER; note = 2'-deoxy-2'-fluorocytidine-3'-phosphate
  modified_base 4: mod_base = OTHER; note = 2'-O-methyladenosine-3'-phosphate
  modified_base 5: mod_base = OTHER; note = 2'-deoxy-2'-fluoroguanosine-3'-phosphate
  modified_base 6: mod_base = OTHER; note = 2'-O-methyluridine-3'-phosphate
  modified_base 7: mod_base = OTHER; note = 2'-deoxy-2'-fluoroguanosine-3'-phosphate
  modified_base 8: mod_base = OTHER; note = 2'-O-methyluridine-3'-phosphate
  modified_base 9: mod_base = OTHER; note = 2'-deoxy-2'-fluorouridine-3'-phosphate
  modified_base 10: mod_base = OTHER; note = 2'-deoxy-2'-fluorocytidine-3'-phosphate
  modified_base 11: mod_base = OTHER; note = 2'-deoxy-2'-fluorouridine-3'-phosphate
  modified_base 12: mod_base = OTHER; note = 2'-O-methyluridine-3'-phosphate
  modified_base 13: mod_base = OTHER; note = 2'-deoxy-2'-fluoroguanosine-3'-phosphate
  modified_base 14: mod_base = OTHER; note = 2'-O-methylcytidine-3'-phosphate
  modified_base 15: mod_base = OTHER; note = 2'-deoxy-2'-fluorouridine-3'-phosphate
  modified_base 16: mod_base = OTHER; note = 2'-O-methylcytidine-3'-phosphate
  modified_base 17: mod_base = OTHER; note = 2'-deoxy-2'-fluorouridine-3'-phosphate
  modified_base 18: mod_base = OTHER; note = 2'-O-methyladenosine-3'-phosphate
  modified_base 19: mod_base = OTHER; note = 2'-deoxy-2'-fluorouridine-3'-phosphate
  modified_base 20: mod_base = OTHER; note = 2'-O-methyladenosine-3'-phosphate
  modified_base 21: mod_base = OTHER; note = 2'-deoxy-2'-fluoroadenosine-3'-phosphate ((2S,4R)-1-[29-[[2-(acetylamino)-2-deoxy-beta-D-galactopyra nosyl]oxy]-14,14-bis[[3-[[3-[[5-[[2-(acetylamino)-2-deoxy-b eta-D-galactopyranosyl]oxy]-1-oxopentyl]amino]propyl]amino] -3-oxopropoxy]methyl]-1,12,19,25-tetraoxo-16-oxa-13,20,24-t riazanonacos-1-yl]-4-hydroxy-2-pyrrolidinyl)methyl ester
aacagtgttcttgctctataa

SEQ ID NO: 331 - RNA, 23 nt, synthetic construct
  source 1..23: mol_type = other RNA
  modified_base 1: mod_base = OTHER; note = 2'-O-methyluridine-3'-phosphorothioate 5'-(E)-Vinylphosphonate
  modified_base 2: mod_base = OTHER; note = 2'-deoxy-2'-fluorouridine-3'-phosphorothioate
  modified_base 3: mod_base = OTHER; note = 2'-O-methyladenosine-3'-phosphate
  modified_base 4: mod_base = OTHER; note = 2'-deoxy-2'-fluorouridine-3'-phosphate
  modified_base 5: mod_base = OTHER; note = 2'-O-methyladenosine-3'-phosphate
  modified_base 6: mod_base = OTHER; note = 2'-deoxy-2'-fluoroguanosine-3'-phosphate
  modified_base 7: mod_base = OTHER; note = 2'-O-methyladenosine-3'-phosphate
  modified_base 8: mod_base = OTHER; note = 2'-deoxy-2'-fluoroguanosine-3'-phosphate
  modified_base 9: mod_base = OTHER; note = 2'-O-methylcytidine-3'-phosphate
  modified_base 10: mod_base = OTHER; note = 2'-deoxy-2'-fluoroadenosine-3'-phosphate
  modified_base 11: mod_base = OTHER; note = 2'-O-methyladenosine-3'-phosphate
  modified_base 12: mod_base = OTHER; note = 2'-O-methylguanosine-3'-phosphate
  modified_base 13: mod_base = OTHER; note = 2'-O-methyladenosine-3'-phosphate
  modified_base 14: mod_base = OTHER; note = 2'-deoxy-2'-fluoroadenosine-3'-phosphate
  modified_base 15: mod_base = OTHER; note = 2'-O-methylcytidine-3'-phosphate
  modified_base 16: mod_base = OTHER; note = 2'-deoxy-2'-fluoroadenosine-3'-phosphate
  modified_base 17: mod_base = OTHER; note = 2'-O-methylcytidine-3'-phosphate
  modified_base 18: mod_base = OTHER; note = 2'-deoxy-2'-fluorouridine-3'-phosphate
  modified_base 19: mod_base = OTHER; note = 2'-O-methylguanosine-3'-phosphate
  modified_base 20: mod_base = OTHER; note = 2'-deoxy-2'-fluorouridine-3'-phosphate
  modified_base 21: mod_base = OTHER; note = 2'-O-methyluridine-3'-phosphorothioate
  modified_base 22: mod_base = OTHER; note = 2'-O-methyluridine-3'-phosphorothioate
  modified_base 23: mod_base = OTHER; note = 2'-O-methyluridine
ttatagagcaagaacactgtttt

SEQ ID NO: 332 - RNA, 21 nt, synthetic construct
  source 1..21: mol_type = other RNA
  modified_base 1: mod_base = OTHER; note = 2'-O,4'-C-methylene adenosine-3'-phosphorothioate
  modified_base 2: mod_base = OTHER; note = 2'-O-methyladenosine-3'-phosphate
  modified_base 3: mod_base = OTHER; note = 2'-deoxy-2'-fluorocytidine-3'-phosphate
  modified_base 4: mod_base = OTHER; note = 2'-O-methyladenosine-3'-phosphate
  modified_base 5: mod_base = OTHER; note = 2'-deoxy-2'-fluoroguanosine-3'-phosphate
  modified_base 6: mod_base = OTHER; note = 2'-O-methyluridine-3'-phosphate
  modified_base 7: mod_base = OTHER; note = 2'-deoxy-2'-fluoroguanosine-3'-phosphate
  modified_base 8: mod_base = OTHER; note = 2'-O-methyluridine-3'-phosphate
  modified_base 9: mod_base = OTHER; note = 2'-deoxy-2'-fluorouridine-3'-phosphate
  modified_base 10: mod_base = OTHER; note = 2'-deoxy-2'-fluorocytidine-3'-phosphate
  modified_base 11: mod_base = OTHER; note = 2'-deoxy-2'-fluorouridine-3'-phosphate
  modified_base 12: mod_base = OTHER; note = 2'-O-methyluridine-3'-phosphate
  modified_base 13: mod_base = OTHER; note = 2'-deoxy-2'-fluoroguanosine-3'-phosphate
  modified_base 14: mod_base = OTHER; note = 2'-O-methylcytidine-3'-phosphate
  modified_base 15: mod_base = OTHER; note = 2'-deoxy-2'-fluorouridine-3'-phosphate
  modified_base 16: mod_base = OTHER; note = 2'-O-methylcytidine-3'-phosphate
  modified_base 17: mod_base = OTHER; note = 2'-deoxy-2'-fluorouridine-3'-phosphate
  modified_base 18: mod_base = OTHER; note = 2'-O-methyladenosine-3'-phosphate
  modified_base 19: mod_base = OTHER; note = 2'-deoxy-2'-fluorouridine-3'-phosphate
  modified_base 20: mod_base = OTHER; note = 2'-O-methyladenosine-3'-phosphate
  modified_base 21: mod_base = OTHER; note = 2'-deoxy-2'-fluoroadenosine-3'-phosphate ((2S,4R)-1-[29-[[2-(acetylamino)-2-deoxy-beta-D-galactopyra nosyl]oxy]-14,14-bis[[3-[[3-[[5-[[2-(acetylamino)-2-deoxy-b eta-D-galactopyranosyl]oxy]-1-oxopentyl]amino]propyl]amino] -3-oxopropoxy]methyl]-1,12,19,25-tetraoxo-16-oxa-13,20,24-t riazanonacos-1-yl]-4-hydroxy-2-pyrrolidinyl)methyl ester
aacagtgttcttgctctataa

SEQ ID NO: 333 - RNA, 23 nt, synthetic construct
  source 1..23: mol_type = other RNA
  modified_base 1: mod_base = OTHER; note = 2'-O-methyluridine-3'-phosphorothioate 5'-(E)-Vinylphosphonate
  modified_base 2: mod_base = OTHER; note = 2'-deoxy-2'-fluorouridine-3'-phosphorothioate
  modified_base 3: mod_base = OTHER; note = 2'-O-methyladenosine-3'-phosphate
  modified_base 4: mod_base = OTHER; note = 2'-deoxy-2'-fluorouridine-3'-phosphate
  modified_base 5: mod_base = OTHER; note = 2'-O-methyladenosine-3'-phosphate
  modified_base 6: mod_base = OTHER; note = 2'-deoxy-2'-fluoroguanosine-3'-phosphate
  modified_base 7: mod_base = OTHER; note = 2'-O-methyladenosine-3'-phosphate
  modified_base 8: mod_base = OTHER; note = 2'-deoxy-2'-fluoroguanosine-3'-phosphate
  modified_base 9: mod_base = OTHER; note = 2'-O-methylcytidine-3'-phosphate
  modified_base 10: mod_base = OTHER; note = 2'-deoxy-2'-fluoroadenosine-3'-phosphate
  modified_base 11: mod_base = OTHER; note = 2'-O-methyladenosine-3'-phosphate
  modified_base 12: mod_base = OTHER; note = 2'-O-methylguanosine-3'-phosphate
  modified_base 13: mod_base = OTHER; note = 2'-O-methyladenosine-3'-phosphate
  modified_base 14: mod_base = OTHER; note = 2'-deoxy-2'-fluoroadenosine-3'-phosphate
  modified_base 15: mod_base = OTHER; note = 2'-O-methylcytidine-3'-phosphate
  modified_base 16: mod_base = OTHER; note = 2'-deoxy-2'-fluoroadenosine-3'-phosphate
  modified_base 17: mod_base = OTHER; note = 2'-O-methylcytidine-3'-phosphate
  modified_base 18: mod_base = OTHER; note = 2'-deoxy-2'-fluorouridine-3'-phosphate
  modified_base 19: mod_base = OTHER; note = 2'-O-methylguanosine-3'-phosphate
  modified_base 20: mod_base = OTHER; note = 2'-deoxy-2'-fluorouridine-3'-phosphate
  modified_base 21: mod_base = OTHER; note = 2'-O-methyluridine-3'-phosphorothioate
  modified_base 22: mod_base = OTHER; note = 2'-O-methyluridine-3'-phosphorothioate
  modified_base 23: mod_base = OTHER; note = 2'-O-methyluridine
ttatagagcaagaacactgtttt

SEQ ID NO: 334 - protein, 23 aa, synthetic construct
  SITE 1..23: note = all D-amino acids
  SITE 1: note = N-terminus forms amide with 6-oxohexanoic acid
  SITE 23: note = C-terminal amide
GLFGEIEELIEEGLENLIDWGNG

SEQ ID NO: 335 - protein, 16 aa, synthetic construct
  SITE 1..4: note = Aib
  SITE 16: note = C-terminal amide
  SITE 1: note = N-terminus connected to  N-(6-oxohexanoyl)-bAla-bAla- Glu-Glu via a bis(3-(2-(2-(2-aminoethoxy)ethoxy)ethoxy)propanoic acid) linker
XXXXWYAWYAWYPPVV

SEQ ID NO: 336 - protein, 5 aa, synthetic construct
  SITE 1..5: note = Cyclic
  SITE 4: note = D-Phe
  SITE 5: note = side chain amino group forms amide with 16-oxohexadecanoic acid
RGDFK
